(19) United States
(12) Patent Application Publication
(10) Pub. No.: US 2026/0201418 A1
(43) Pub. Date: Jul. 16, 2026

(54) ADENOVIRAL HELPER PLASMID

(71) Applicant: Forge Biologics, Inc., Grove City, OH (US)

(72) Inventors: Angela M. Adsero, Groveport, OH (US); Brendan Chestnut, Groveport, OH (US); Linas Padegimas, Mayfield Heights, OH (US); David Dismuke, Cary, NC (US)

(21) Appl. No.: 19/130,904

(22) PCT Filed: Nov. 16, 2023
(86) PCT No.: PCT/US2023/080063

§ 371 Date: May 16, 2025

Related U.S. Application Data
(60) Provisional application No. 63/426,028, filed on Nov. 16, 2022.
(60) Provisional application No. 63/596,201, filed on Nov. 3, 2023.

(51) Int. Cl. C12N 15/864; C12N 7/02; C12N 15/861

(52) U.S. Cl. CPC C12N 15/8645; C12N 7/025; C12N 15/8613; C12N 2710/10044; C12N 2750/14143; C12N 2750/14144; C12N 2750/14152; C12N 2800/10; C12N 2830/34; C12N 2830/50

(57) ABSTRACT

The present disclosure provides improved adenoviral helper plasmids for the production of recombinant adeno-associated viruses.

### CROSS REFERENCE TO RELATED APPLICATIONS

[0001] This application claims priority to and the benefit of U.S. Provisional Patent Application Nos. 63/426,028, filed on Nov. 16, 2022 and 63/596,201, filed on Nov. 3, 2023, the entire contents of which are hereby incorporated by reference in their entirety.

### BACKGROUND

[0002] Adeno-associated virus (AAV) technology has quickly become a dominant form of gene therapy for genetic diseases. AAVs can be produced in large scale in a variety of host cell systems, including mammalian cells, such as HEK293 cells. Traditionally, AAV production in mammalian cells involves the introduction of multiple plasmids to the host cells, the plasmids encoding, for example, a human gene or genes of interest, and various viral genes critical for viral replication and packaging. Due to the number of genes required for proper replication, these are traditionally delivered on two or three separate plasmids.

[0003] One such plasmid, termed an “adenoviral helper” plasmid, contains genes critical for AAV production from a host cell. Adenoviral helper plasmids containing E2a, VA RNA, and E4 genes have been shown to be critical to promoting AAV production in mammalian host cell systems.

[0004] Despite much advancement over the last two decades, concerns regarding the cost and safety of AAV production continue to limit the therapeutic potential of AAV technology. These concerns are due in part to the large size of many helper plasmids, which is due to the provision of a large number of genes on a single helper plasmid to support AAV production. The safety concerns are due in part to the production, albeit at low levels, of potentially cytotoxic and/or inflammatory viral proteins that are not necessary for AAV replication.

### SUMMARY

[0005] In some embodiments, the present disclosure, provides, among other things, an adenoviral helper plasmid. In some embodiments, the present disclosure provides an adenoviral helper plasmid with reduced size relative to those known in the art. In some embodiments, the present disclosure provides an adenoviral helper plasmid comprising nucleotide sequences encoding E2a, VA RNA. E4; and an L4 region. In some embodiments, an adenoviral helper plasmid as described herein comprises nucleotide sequences encoding proteins from other viruses. In some embodiments, an adenoviral helper plasmid as described herein comprises nucleotide sequences encoding proteins from other viruses, including HSV-1 UL30, HSV-1 UL42, and/or HSV-1 UL29.

[0006] In some embodiments, the present disclosure provides an adenoviral helper plasmid that does not comprise one or more nucleotide sequences encoding one or more of fiber protein; L1-52/55K (Packaging Protein 3), peripentonal Hexon-Associated protein, and an L4 region. In some embodiments, the present disclosure provides an adenoviral helper plasmid comprising a fragment, portion, or partial form of E2a protein, VA RNA, E4, and an L4 region. In some embodiments, the present disclosure provides an adenoviral helper plasmid that does not comprise one or more nucleotide sequences encoding one or more of Hexon Associated Precursor (L4 pVIII) protein, DNA Terminal Protein, and 23 kDa endoprotease. In some embodiments, the present disclosure provides an adenoviral helper plasmid that does not comprise one or more nucleotide sequences encoding one or more of E4orf1, E4orf2, E4orf3, and E4orf7. In some embodiments, an adenoviral helper plasmid provides herein comprises a kanamycin resistance gene.

[0007] In some embodiments, the present disclosure provides an adenoviral helper plasmid in which expression of E2a protein is under the control of one or more of an E2a promoter, chicken β-actin promoter, and SV40 promoter. In some embodiments, the present disclosure provides an adenoviral helper plasmid in which expression of E4 open reading frames (ORFs) is under the control of one or more of a native E4 promoter and SV40 promoter.

[0008] In some embodiments, the present disclosure provides an adenoviral helper plasmid comprising a nucleotide sequence that is at least 80% identical to SEQ ID NO: 1-3, 5, 7, 9, 11-12, 14-20, 22, 24, 26-29, 31, 33, 35-37, 39-53, 56, 59, 62, 65, 68 or 80-105. In some embodiments, the present disclosure provides an adenoviral helper plasmid comprising a nucleotide sequence that encodes for an amino acid sequence that is at least 80% identical to SEQ ID NO: 4, 6, 8, 10, 13, 21, 23, 25, 30, 32, 34, 38, 55, 58, 61, 64, 67, or 69. In some embodiments, the present disclosure provides an adenoviral helper plasmid comprising a nucleotide sequence that is at least 80% identical to any one of SEQ ID NO: 41-49, 70, or 80-105.

[0009] In some embodiments, the present disclosure provides for provision of the L4 region in trans relative to an adenoviral helper plasmid. In some embodiments the present disclosure provides an L4 trans plasmid comprising a nucleotide sequence encoding an engineered L4 region. In some embodiments, an L4 trans plasmid encodes for an L4 region (e.g., L4 33K and L4 22K. In some embodiments, an L4 trans plasmid encodes for L4 33K. In some embodiments, an L4 trans plasmid encodes for L4 22K. In some embodiments the present disclosure provides a composition comprising an adenoviral helper plasmid described herein and an L4 trans plasmid described herein.

[0010] In some embodiments, the present disclosure provides methods of producing recombinant adenoviral associated viral vectors (rAAV). In some embodiments, a method of producing a rAAV comprises transfecting a producer cell with an AAV vector plasmid, and an adenoviral helper plasmid as described herein. In some embodiments a method of producing a rAAV comprises transfecting a producer cell with an AAV vector plasmid, an AAV Rep-Cap expressing plasmid, and an adenoviral helper plasmid described herein. In some embodiments a method of producing a rAAV further comprises transfecting a producer cell with an L4 trans plasmid. In some embodiments, a producer cell stably expresses Rep-Cap. In some embodiments, a producer cell comprises a nucleotide sequence encoding an L4 region or portion thereof (e.g., L4 33K and/or L4 22K).

### BRIEF DESCRIPTION OF THE DRAWING

[0011] FIG. 1. shows a plasmid map illustrating adenoviral helper plasmid pEMBR-1.2.

[0012] FIG. 2. shows vector yields obtained using pEMBR-1.2 and commercially available pX80 as the adenoviral helper plasmid.

[0013] FIG. 3. shows vector transgene purity and vector capsid purity obtained using pEMBR-1.2 or commercially available pX80 as the adenoviral helper plasmid.

[0014] FIG. 4. shows a comparison between the GFP expression levels obtained following the transformation of HEK293 cells with recombinant AAV RH.10, ssCMV-GFP transgene, and either pX80 or pEMBR helper plasmid.

[0015] FIG. 5. shows a plasmid map illustrating adenoviral helper plasmid pEMBR-1.3 and pEMBR-1.3B.

[0016] FIG. 6. shows a plasmid map illustrating adenoviral helper plasmid pEMBR-1.4 and pEMBR-1.4B.

[0017] FIG. 7. shows a plasmid map illustrating adenoviral helper plasmid pEMBR-1.5.

[0018] FIG. 8. shows a plasmid map illustrating adenoviral helper plasmid pEMBR-1.5A.

[0019] FIG. 9. shows an exemplary sequence map of native Adenovirus Type 5 genome including, among other things, VA RNA, E2a, and E4 regions (Panel A). Panels B, C, and D show the approximate sizes from pEMBR-1.2B2 of our VA RNA region (Panel B), E2a region (Panel C), and E4 region (Panel D) in comparison to the region from Matsushita 1998 annotated on the native Adenovirus sequence.

[0020] FIG. 10. shows an exemplary plasmid map containing VA RNA, E2a, and E4 regions, for example, as defined by restriction enzyme sites, e.g., as in plasmids described herein.

[0021] FIG. 11. shows a sequence map illustrating E2a region of pEMBR-1.2B2.

[0022] FIG. 12. shows sequences maps for various promoters upstream of E2a regions within various pEMBR plasmids as described herein.

[0023] FIG. 13. shows sequence maps for various truncations to the NotI end of the pEMBR1.2B2 E2a region, with one truncation construct having the addition of a promoter, as described herein.

[0024] FIG. 14. shows a table summarizing plasmid size (bp), VA RNA region modifications, E2a region modifications, and E4 region modifications in various pEMBR plasmids as described herein.

[0025] FIG. 15. shows average AAV9:eGFP titer (VG/mL) as measured by qPCR (Panel A) and ddPCR (Panel B) and protein expression of Rep proteins and E2a as measured by Western Blot (Panel C) using various pEMBR plasmids as described herein.

[0026] FIG. 16. shows average AAV9:eGFP titer (VG/mL) as measured by qPCR using various pEMBR plasmids as described herein.

[0027] FIG. 17. shows a table summarizing the inclusion of JEP, GEP, and native L4 (33K & 22K) and expression of E2a protein and production of AAV in various pEMBR plasmids as described herein.

[0028] FIG. 18. shows a table summarizing plasmid size (bp), VA RNA region modifications, E2a region modifications, and E4 region modifications in various pEMBR plasmids as described herein.

[0029] FIG. 19. shows a table summarizing plasmid size (bp), VA RNA region modifications, E2a region modifications. E4 region modifications, and AAV production relative to pEMBR-1.2.B2 in various pEMBR plasmids as described herein.

[0030] FIG. 20. shows sequence maps for native E4 region (Panel A) and SV40 promoter driven E4 ORF4 and E4 ORF6 with SV40 poly(A) signal (Panel B) (e.g., as present in pEMBR-1.7B2).

[0031] FIG. 21. shows a sequence map illustrating E2a region of pEMBR-1.2B2. The native L4 region (circled) illustrates sequences for 33 k and 22 k protein, contains 50 bp upstream of native promoter, and the presumably native poly(a) signal sequence. The L4 expression construct shown below reserves all the same features as the native L4 region except the native polyA signal has been replaced with a synthetic 49 bp polyA signal sequence.

[0032] FIG. 22. shows average AAV9:eGFP titer (VG/mL) using various pEMBR plasmids as described herein.

[0033] FIG. 23. shows average AAV titer compared to pEMBR-1.2B2 titer and plasmid size (bp) using various pEMBR plasmids as described herein.

[0034] FIG. 24. shows a plasmid map illustrating adenoviral helper plasmid pEMBR-1.37B2+L4-minKanR-v2.

[0035] FIG. 25. shows a sequence map for an exemplary E2a region which has been engineered to reduce plasmid size while maintaining AAV production.

[0036] FIG. 26. shows the location of the sequences reducing the E2a region in comparison to native Adenovirus Type 5 genome.

[0037] FIG. 27 shows a wild-type AAV E2a region with the additional depiction of the L4 region ORFs for 22K and 33K protein. The partial JEP sequence is depicted below JEP by the smallest open arrow, to draw attention to how this natural E2a promoter sequence can be added plasmids described herein when the L4 33K protein is added.

[0038] FIG. 28A and FIG. 28B show rescue of AAV titer by L4 region addition. FIG. 28A shows average rAAV titer (VG/mL) from triplicate 75 mL quadruple plasmid transfected cultures determined by qPCR for the pEMBR-1.3 plasmid containing the partial JEP (PJ) E2a construct plus the pUC57 vector containing the specified L4 construct in comparison to wild type plus empty vector (pEMBR-1.2B2+pUC57) production. The Partial JEP construct is shown as a reference. FIG. 28B shows Rep and E2a western blots of RIPA lysates from transfected cultures in 28A.). Beta-actin is shown as a loading control. Adenovirus type 5 infected HEK293/HEK293T cells are shown as a positive control and uninfected/nontransfected HEK293 cells are shown as a negative control.

[0039] FIGS. 29A, 29B, and 29C show increase of AAV titer by provision of additional copies of L4 and L33K. FIG. 29A shows the E2a regions of the helper plasmids used in quadruple plasmid transient transfection. FIG. 29B shows the average rAAV titer (VG/mL) from triplicate 75 mL quadruple plasmid transfected cultures determined by qPCR for the E2a constructs indicated in the figure plus the pUC57 vector containing the specified L4 construct to compare L4 gene dosage of 1X L4 genes, 2X L4 genes, 1X 33K with 2X 22K, and 2X 33K with 1X 22K against the control condition (wild type plus empty vector; 1.2B2+pUC57). FIG. 29C shows the Rep and E2a western blots of RIPA lysates from transfected cultures in FIG. 29A. Beta-actin is shown as a loading control. Adenovirus type 5 infected HEK293/HEK293T cells are shown as a positive control and uninfected/nontransfected HEK293 cells are shown as a negative control.

### DEFINITIONS

[0040] Agent: In general, the term “agent”, as used herein, is used to refer to an entity (e.g., for example, a lipid, metal, nucleic acid, polypeptide, polysaccharide, small molecule, etc, or complex, combination, mixture or system [e.g., cell, tissue, organism] thereof), or phenomenon (e.g., heat, electric current or field, magnetic force or field, etc). In appropriate circumstances, as will be clear from context to those skilled in the art, the term may be utilized to refer to an entity that is or comprises a cell or organism, or a fraction, extract, or component thereof. Alternatively or additionally, as context will make clear, the term may be used to refer to a natural product in that it is found in and/or is obtained from nature. In some instances, again as will be clear from context, the term may be used to refer to one or more entities that is man-made in that it is designed, engineered, and/or produced through action of the hand of man and/or is not found in nature. In some embodiments, an agent may be utilized in isolated or pure form; in some embodiments, an agent may be utilized in crude form. In some embodiments, potential agents may be provided as collections or libraries, for example that may be screened to identify or characterize active agents within them. In some cases, the term “agent” may refer to a compound or entity that is or comprises a polymer; in some cases, the term may refer to a compound or entity that comprises one or more polymeric moieties. In some embodiments, the term “agent” may refer to a compound or entity that is not a polymer and/or is substantially free of any polymer and/or of one or more particular polymeric moieties. In some embodiments, the term may refer to a compound or entity that lacks or is substantially free of any polymeric moiety.

[0041] Approximately/about: As used herein, the term “approximately” or “about,” as applied to one or more values of interest, refers to a value that is similar to a stated reference value. In certain embodiments, the term “approximately” or “about” refers to a range of values that fall within 25%, 20%, 19%, 18%, 17%, 16%, 15%, 14%, 13%, 12%, 11%, 10%, 9%, 8%, 7%, 6%, 5%, 4%, 3%. 2%, 1%, or less in either direction (greater than or less than) of the stated reference value unless otherwise stated or otherwise evident from the context (except where such number would exceed 100% of a possible value).

[0042] Comparable: As used herein, the term “comparable” refers to two or more agents, entities, situations, sets of conditions. etc., that may not be identical to one another but that are sufficiently similar to permit comparison therebetween so that one skilled in the art will appreciate that conclusions may reasonably be drawn based on differences or similarities observed. In some embodiments, comparable sets of conditions, circumstances, individuals, or populations are characterized by a plurality of substantially identical features and one or a small number of varied features. Those of ordinary skill in the art will understand, in context, what degree of identity is required in any given circumstance for two or more such agents, entities, situations, sets of conditions, etc to be considered comparable. For example, those of ordinary skill in the art will appreciate that sets of circumstances. individuals, or populations are comparable to one another when characterized by a sufficient number and type of substantially identical features to warrant a reasonable conclusion that differences in results obtained or phenomena observed under or with different sets of circumstances, individuals, or populations are caused by or indicative of the variation in those features that are varied.

[0043] Corresponding to: As used herein, the term “corresponding to” may be used to designate the position/identity of a structural element in a compound or composition through comparison with an appropriate reference compound or composition. For example, in some embodiments, a monomeric residue in a polymer (e.g., an amino acid residue in a polypeptide or a nucleic acid residue in a polynucleotide) may be identified as “corresponding to” a residue in an appropriate reference polymer. For example, those of ordinary skill will appreciate that, for purposes of simplicity, residues in a polypeptide are often designated using a canonical numbering system based on a reference related polypeptide, so that an amino acid “corresponding to” a residue at position 190, for example, need not actually be the 190^{th} amino acid in a particular amino acid chain but rather corresponds to the residue found at 190 in the reference polypeptide; those of ordinary skill in the art readily appreciate how to identify “corresponding” amino acids. For example, those skilled in the art will be aware of various sequence alignment strategies, including software programs such as, for example, BLAST, CS-BLAST, CUSASW++, DIAMOND, FASTA. GGSEARCH/GLSEARCH, Genoogle, HMMER. HHpred/HHsearch, IDF, Infernal, KLAST, USEARCH, parasail, PSI-BLAST, PSI-Search. ScalaBLAST, Sequilab, SAM, SSEARCH, SWAPHI, SWAPHI-LS, SWIMM, or SWIPE that can be utilized, for example, to identify “corresponding” residues in polypeptides and/or nucleic acids in accordance with the present disclosure.

[0044] Downstream: As used herein, the term “downstream” refers to the location or position of a nucleic acid sequence relative to a reference nucleic acid sequence, particularly a position that, during RNA transcription, is closer to the 3′ end of the transcribed RNA molecule encoded by the reference sequence. For example, for two sequences, A and B, such that sequence A is downstream of sequence B, transcription of sequence B proceeds toward sequence A.

[0045] Nucleic acid: As used herein, in its broadest sense, the term “nucleic acid” refers to any compound and/or substance that is or can be incorporated into an oligonucleotide chain. In some embodiments, a nucleic acid is a compound and/or substance that is or can be incorporated into an oligonucleotide chain via a phosphodiester linkage. As will be clear from context, in some embodiments. “nucleic acid” refers to an individual nucleic acid residue (e.g., a nucleotide and/or nucleoside): in some embodiments, “nucleic acid” refers to an oligonucleotide chain comprising individual nucleic acid residues. In some embodiments, a “nucleic acid” is or comprises RNA; in some embodiments, a “nucleic acid” is or comprises DNA. In some embodiments, a nucleic acid is. comprises, or consists of one or more natural nucleic acid residues. In some embodiments, a nucleic acid is, comprises, or consists of one or more nucleic acid analogs. In some embodiments, a nucleic acid analog differs from a nucleic acid in that it does not utilize a phosphodiester backbone. For example, in some embodiments, a nucleic acid is, comprises, or consists of one or more “peptide nucleic acids”, which are known in the art and have peptide bonds instead of phosphodiester bonds in the backbone, are considered within the scope of the present invention. Alternatively or additionally, in some embodiments, a nucleic acid has one or more phosphorothioate and/or 5′-N-phosphoramidite linkages rather than phosphodiester bonds. In some embodiments, a nucleic acid is, comprises, or consists of one or more natural nucleosides (e.g., adenosine, thymidine, guanosine, cytidine, uridine, deoxyadenosine, deoxythymidine, deoxy guanosine, and deoxycytidine). In some embodiments, a nucleic acid is, comprises, or consists of one or more nucleoside analogs (e.g., 2-aminoadenosine, 2-thiothymidine, inosine, pyrrolo-pyrimidine, 3-methyl adenosine, 5-methylcytidine, C-5 propynyl-cytidine, C-5 propynyl-uridine, 2-aminoadenosine, C5-bromouridine. C5-fluorouridine, C5-iodouridine. C5-propynyl-uridine, C5-propynyl-cytidine, C5-methylcytidine, 2-aminoadenosine, 7-deazaadenosine, 7-deazaguanosine, 8-oxoadenosine, 8-oxoguanosine, 0(6)-methylguanine, 2-thiocytidine, methylated bases, intercalated bases, and combinations thereof). In some embodiments, a nucleic acid comprises one or more modified sugars (e.g., 2′-fluororibose, ribose. 2′-deoxyribose, arabinose. and hexose) as compared with those in natural nucleic acids. In some embodiments, a nucleic acid has a nucleotide sequence that encodes a functional gene product such as an RNA or protein. In some embodiments, a nucleic acid includes one or more introns. In some embodiments, nucleic acids are prepared by one or more of isolation from a natural source. enzymatic synthesis by polymerization based on a complementary template (in vivo or in vitro), reproduction in a recombinant cell or system, and chemical synthesis. In some embodiments, a nucleic acid is at least 3, 4, 5, 6, 7, 8, 9, 10, 15, 20, 25, 30, 35, 40, 45, 50, 55, 60, 65, 70, 75, 80, 85, 90, 95, 100, 110, 120, 130, 140, 150, 160, 170, 180, 190, 20, 225, 250, 275, 300, 325, 350, 375, 400, 425, 450, 475, 500, 600, 700, 800, 900, 1000, 1500, 2000, 2500, 3000, 3500, 4000, 4500, 5000 or more residues long. In some embodiments, a nucleic acid is partly or wholly single stranded; in some embodiments, a nucleic acid is partly or wholly double stranded. In some embodiments a nucleic acid has a nucleotide sequence comprising at least one element that encodes, or is the complement of a sequence that encodes, a polypeptide. In some embodiments, a nucleic acid has enzymatic activity.

[0046] Operably linked: As used herein, the term “operably linked” refers to a juxtaposition wherein the components described are in a relationship permitting them to function in their intended manner. A control element “operably linked” to a functional element is associated in such a way that expression and/or activity of the functional element is achieved under conditions compatible with the control element. In some embodiments, “operably linked” control elements are contiguous (e.g., covalently linked) with the coding elements of interest; in some embodiments, control elements act in trans to or otherwise at a distance from the functional element of interest.

[0047] Producer cell: As used herein, the term “producer cell” refers to any cell used to produce recombinant AAV (rAAV). In some embodiments, a producer cell is a mammalian cell. In some embodiments, a producer cell is a transformed mammalian cell. In some embodiments, a producer cell is a Vero, HeLa, HEK293, HEK293T cell or derivative thereof.

[0048] Transformation: As used herein, the term “transformation” refers to any process by which exogenous DNA is introduced into a host cell. Transformation may occur under natural or artificial conditions using various methods well known in the art. Transformation may rely on any known method for the insertion of foreign nucleic acid sequences into a prokaryotic or eukaryotic host cell. In some embodiments, a particular transformation methodology is selected based on the host cell being transformed and may include, but is not limited to, viral infection, electroporation, mating, lipofection. In some embodiments, a “transformed” cell is stably transformed in that the inserted DNA is capable of replication either as an autonomously replicating plasmid or as part of the host chromosome. In some embodiments, a transformed cell transiently expresses introduced nucleic acid for limited periods of time.

[0049] Upstream: As used herein, the term “upstream” refers to the location or position of a nucleic acid sequence relative to a reference nucleic acid sequence, particularly a position that, during RNA transcription, is closer to the 5′ end of the transcribed RNA molecule encoded by the reference sequence. For example, for two sequences, A and B, such that sequence A is upstream of sequence B, transcription of sequence B proceeds away from sequence A.

[0050] Vector: As used herein, the term “vector” refers to a nucleic acid molecule capable of transporting another nucleic acid to which it has been linked. One type of vector is a “plasmid”, which refers to a circular double stranded DNA loop into which additional DNA segments may be ligated. Another type of vector is a viral vector, wherein additional DNA segments may be ligated into the viral genome. Certain vectors are capable of autonomous replication in a host cell into which they are introduced (e.g., bacterial vectors having a bacterial origin of replication and episomal mammalian vectors). Other vectors (e.g., non-episomal mammalian vectors) can be integrated into the genome of a host cell upon introduction into the host cell, and thereby are replicated along with the host genome. Moreover, certain vectors are capable of directing the expression of genes to which they are operatively linked. Such vectors are referred to herein as “expression vectors.” Standard techniques may be used for recombinant DNA, oligonucleotide synthesis, and tissue culture and transformation (e.g., electroporation. lipofection). Enzymatic reactions and purification techniques may be performed according to manufacturer's specifications or as commonly accomplished in the art or as described herein. The foregoing techniques and procedures may be generally performed according to conventional methods well known in the art and as described in various general and more specific references that are cited and discussed throughout the present specification. See e.g., Sambrook et al., Molecular Cloning: A Laboratory Manual (2d ed., Cold Spring Harbor Laboratory Press, Cold Spring Harbor, N.Y. (1989)), which is incorporated herein by reference for any purpose.

### DETAILED DESCRIPTION OF CERTAIN EMBODIMENTS

[0051] The helper functions adenoviruses provide for AAV replication have been previously described. Without wishing to be bound by any particular hypothesis, adenoviral E1A protein has been described to activate AAV gene expression by binding and activating the AAV P5 rep promoter. Similarly. E2A. another adenoviral protein, has been described to activate AAV P5 promoter transcription. E2A has also been described to cooperate with virus associated RNA I (VA RNAI) to enhance the translation of AAV RNAs. Adenoviral E4orf4 has been shown to induce cell-cycle arrest at the G2/M border, as well as to aid in AAV production. Adenoviral E4orf6 has been described to enhance the conversion of single-stranded recombinant AAV genomes into double-stranded genomes, a rate-limiting step of viral DNA-replication both in vitro and in vivo. VA RNAI has also been described to support AAV replication. It has been described that VA RNAI physically interacts with the double-stranded RNA-activated protein kinase (PKR), which would otherwise elicit an antiviral immune response blocking viral protein production.

[0052] Prior studies have suggested that in HEK293 cells, which provide the E1 gene, the minimal set of genes in trans for efficient recombinant AAV production is E2a, E4orf6 and the VA RNAI gene. A helper plasmid named pXX6-80, containing this set of genes as well as additional genes that may not be necessary for production, is used for the production of adenovirus-free recombinant AAV.

[0053] One major ongoing challenge in the development and optimization of AAV vectors for clinical applications is to increase the amount of viruses being produced. Due to their non-proliferative nature, their production depends solely on the transfection efficiency of the parvoviral genomic components into the packaging cell lines (for example human embryonic kidney cells, HEK293 or HEK293T, or insect cells e.g., Sf9). Thus, it remains of high importance to develop means to increase recombinant AAV (rAAV) production.

[0054] Other major challenges related to the production of rAAVs for clinical applications are those related to the cost to produce such rAAVs in large quantities, and also to the safety of the final products themselves. For example, commercially available helper plasmids, such as pXX6-80, appear to transcribe low levels of the Ad fiber protein. Importantly, the fiber protein is not required for AAV production, and could be immunogenic in humans. In addition, the size of pXX6-80 is rather large, at over 18 kb. This large plasmid size increases the difficulty and cost of its manufacturing, which can be highly impactful when sourcing GMP plasmids for the manufacturing of clinical-grade AAV.

[0055] Different versions of adenoviral helper plasmids have been derived by others, including, for example, pFAdDeltaF6 (derived at the University of Pennsylvania) and pHelper (Agilent). The pFAdDeltaF6 plasmid is about 3 kb smaller than pXX6-80, but retains the fiber gene sequence. The pHelper plasmid, which is available from Agilent, is smaller than pXX6-80, at about 11.6 kb. However, it contains an ampicillin resistance gene, which is generally discouraged for plasmids used in AAV production.

[0056] The present disclosure addresses the above-described technical challenges by providing compositions and methods described herein.

[0057] In some embodiments, the present disclosure relates to adenovirus derived helper plasmids (an adenoviral helper plasmid) comprising adenoviral DNA sequences encoding viral helper proteins. In some embodiments, adenoviral helper plasmids of the present invention are used in methods of production of recombinant adeno-associated viruses (rAAVs). In some embodiments, adenoviral helper plasmids of the present disclosure increase production of rAAVs.

[0058] In some embodiments, the present disclosure provides an adenoviral helper plasmid comprising nucleotide sequences encoding proteins derived from sources that are not adenovirus. In some embodiments, the present disclosure provides an adenoviral helper plasmid comprising nucleotide sequences encoding proteins derived from viruses other than adenovirus. In some embodiments, an adenoviral helper plasmid comprises all or a portion of an adenoviral nucleotide sequence encoding adenoviral proteins E2a and E4, L4 region, as well as non-coding RNA VA RNA. In some embodiments, present disclosure describes improved adenoviral helper plasmids that are smaller than the leading commercially available adenoviral helper plasmids, and that allow for safer and less costly production of rAAVs in producer cell expression systems.

[0059] In some embodiments, the present disclosure provides an adenoviral helper plasmid that has reduced overall size relative to presently available adenoviral helper plasmids (e.g., pXX6-80 at 18.932 kbp; pALD-X80 at 18.876 kbp: pHelper at 11.635 kbp; pFAdDeltaF6 at 15.420 kbp).

[0060] In some embodiments, the present disclosure provides adenoviral helper plasmids having a smaller size. In some embodiments, an adenoviral helper plasmid of the present disclosure is approximately between 6.5 kb and 15.5 kb. In some embodiments, an adenoviral helper plasmid of the present disclosure has a size that is approximately 6 kb, 7 kb, 8 kb, 9 kb, 10 kb, 11 kb, 12 kb, 13 kb, 14 kb. 15 kb, or 16 kb. In some embodiments, an adenoviral helper plasmid of the present disclosure has a size that is approximately 6-7 kb; 6.5-7.5 kb; 7-8 kb; 7.5-8.5 kb; 8-9 kb; 8.5-9.5 kb; 9-10 kb; 9.5-10.5 kb; 10-11 kb; 10.5-11.5 kb; 11-12 kb; 11.5-12.5 kb; 12-13 kb; 12.5-13.5 kb; 13-14 kb; 13.5-14.5 kb; 14-15 kb; 14.5-15.5 kb: 15-16 kb. The smaller size of the adenoviral helper plasmids of the present disclosure enables the simpler and less costly production of AAV at the quantities necessary for large-scale manufacturing of AAV. In some embodiments, removing genes and/or portions of genes makes an adenoviral helper plasmid of the present disclosure safer, since the producing cells would not produce the adenovirus structural proteins (e.g., fiber, 100K and hexon assembly), that could co-purify with AAV during downstream processing and would therefore present a lower risk of inadvertently introducing adenovirus structural proteins to patients.

[0061] In some embodiments, removal of adenoviral helper genes resulting in a smaller adenoviral helper plasmid enables addition of supplementary genes to further improve AAV quality and yield. Although these supplementary genes increase the size of the plasmid relative to the smallest versions, they enable comparable or higher AAV productivity and are therefore worth the additional cost to produce. Importantly, these plasmids are still smaller than commercially available helper plasmids such as, for example, pALD-X80.

### Adenoviral Helper Plasmids

### Helper Genes and Resistance Genes

[0062] In some embodiments, an adenoviral helper plasmid of the present disclosure comprises one or more nucleotide sequence(s) encoding proteins selected from the group consisting of E2b, E2a, E4orf4, E1B55K, E1b19K, E1a, E4orf6, VA RNA, and combinations thereof.

[0063] In some embodiments, an adenoviral helper plasmid comprises a nucleotide sequence encoding an E4 region and a VA RNA region. In some embodiments, an E4 region comprises one or more of E4orf1, E4orf2, E4orf3, E4orf4, E4orf5, E4orf6, and E4orf7. In some embodiments. E4orf1 has a nucleotide sequence that is at least 80%, 85%, 90%, 95%. 99%, or 100% identical to SEQ ID NO: 53. In some embodiments, E4orf1 has an amino acid sequence that is at least 80%, 85%, 90%, 95%, 99%, or 100% identical to SEQ ID NO: 55. In some embodiments, E4orf2 has a nucleotide sequence that is at least 80%, 85%, 90%, 95%, 99%, or 100% identical to SEQ ID NO: 56. In some embodiments, E4orf2 has an amino acid sequence that is at least 80%, 85%, 90%, 95%, 99%, or 100% identical to SEQ ID NO: 58. In some embodiments, E4orf3 has a nucleotide sequence that is at least 80%, 85%, 90%, 95%, 99%, or 100% identical to SEQ ID NO: 59. In some embodiments, E4orf3 has an amino acid sequence that is at least 80%, 85%, 90%, 95%, 99%, or 100% identical to SEQ ID NO: 61. In some embodiments, E4orf4 has a nucleotide sequence that is at least 80%, 85%, 90%, 95%, 99%, or 100% identical to SEQ ID NO: 62. In some embodiments, E4orf4 has an amino acid sequence that is at least 80%, 85%, 90%, 95%, 99%, or 100% identical to SEQ ID NO: 64. In some embodiments, E4orf6 has a nucleotide sequence that is at least 80%, 85%, 90%, 95%, 99%, or 100% identical to SEQ ID NO: 65. In some embodiments. E4orf6 has an amino acid sequence that is at least 80%, 85%, 90%, 95%. 99%, or 100% identical to SEQ ID NO: 67. In some embodiments, E4orf7 has a nucleotide sequence that is at least 80%, 85%, 90%, 95%, 99%, or 100% identical to SEQ ID NO: 68. In some embodiments, E4orf7 has an amino acid sequence that is at least 80%, 85%, 90%, 95%, 99%, or 100% identical to SEQ ID NO: 69. In some embodiments, an adenoviral helper plasmid does not comprise a nucleotide sequence comprising E4orf1. In some embodiments, an adenoviral helper plasmid does not comprise a nucleotide sequence comprising E4orf2. In some embodiments, an adenoviral helper plasmid does not comprise a nucleotide sequence comprising E4orf1 and does not comprise a nucleotide sequence comprising E4orf2. In some embodiments, expression of the E4 region is under the control of an E4 mini promoter. In some embodiments, an E4 region is operably linked to an E4 mini promoter. In some embodiments, an E4 mini promoter has a nucleotide sequence that is at least 80%, 85%, 90%, 95%, 99%, or 100% identical to SEQ ID NO: 1. In some embodiments, an E4 region is operably linked to an SV40 promoter. In some embodiments. expression of the E4 region is under the control of an SV40 promoter. In some embodiments, an SV40 promoter has a nucleotide sequence that is at least 80%, 85%, 90%, 95%, 99%, or 100% identical to SEQ ID NO: 2.

[0064] In some embodiments, an adenoviral helper plasmid of the present invention comprises a resistance gene. In some embodiments, an adenoviral helper plasmid of the present invention comprises an ampicillin resistance gene (e.g., a nucleotide sequence encoding a protein conferring resistance to ampicillin). In some embodiments, an adenoviral helper plasmid of the present invention does not comprise an ampicillin resistance gene. In some embodiments. an adenoviral helper plasmid of the present invention comprises a kanamycin resistance gene (e.g., a nucleotide sequence encoding a protein conferring resistance to kanamycin). In some embodiments, an adenoviral helper plasmid of the present invention does not comprise a kanamycin resistance gene.

### E2a Region

[0065] In some embodiments, an adenoviral helper plasmid of the present disclosure comprises an E2a region. In some embodiments an E2a region, as used herein, comprise(s) one or more nucleotide sequences encoding an E2a protein and an engineered L4 region. In some embodiments, an adenoviral helper plasmid of the present disclosure comprises an E2a region that has been modified. In some embodiments, the E2a region of an adenoviral helper plasmid of the present disclosure comprises deletions to reduce plasmid size while maintaining production of E2a protein and AAV.

[0066] In some embodiments, the E2a region has been modified to comprise deletions while keeping JEP promoter sequence that corresponds to that identified by Jing et al., 2001. Inhibition of adenovirus cytotoxicity, replication, and E2a gene expression by adeno-associated virus. Virology, 291(1), pp. 140-151, which is incorporated herein by reference for any purpose. In some embodiments, an E2a region has been modified to comprise deletions while keeping GEP promoter sequence that corresponds to that identified by Guilfoyle et al., 1985. Two functions encoded by adenovirus early region 1A are responsible for the activation and repression of the DNA-binding protein gene. The EMBO Journal, 4(3), pp. 707-713, which is incorporated herein by reference for any purpose.

[0067] In some embodiments, the E2a region has been modified to comprise deletions while keeping a certain amount of nucleotides upstream of E2a (e.g., 1 kbp or 50 bp upstream of E2a).

[0068] In some embodiments, the E2a region has been modified to comprise truncations starting from the NotI end of adenoviral helper plasmids of the present disclosure.

[0069] In some embodiments, the E2a region has been modified as illustrated in FIGS. 12-14 and/or 18-19 and/or 25, 29A.

### L4 Region

[0070] In some embodiments, an adenoviral helper plasmid of the present disclosure comprises an L4 region. In some embodiments, an adenoviral helper plasmid of the present disclosure comprises one or more nucleotide sequence(s) in an L4 region which encodes one or more protein(s) (e.g., 33 k, 22 k, etc.).

[0071] In some embodiments, an adenoviral helper plasmid of the present disclosure comprises an L4 region that has been modified. In some embodiments, the L4 region of an adenoviral helper plasmid of the present disclosure comprises deletions to reduce plasmid size while maintaining production of L4 33 k and L422 k protein and AAV.

[0072] In some embodiments, an adenoviral helper plasmid of the present disclosure encodes for but does not express L4 33 k and L422 k protein. In some embodiments, the L4 region of an adenoviral helper plasmid of the present disclosure comprises modifications to abolish expression of L4 33 k and L422 k protein while maintaining nucleotide sequences that encode for L4 33 k and L422 k.

[0073] In some embodiments, the L4 region of an adenoviral helper plasmid of the present disclosure comprises deletions which abolish expression of L4 100K. In some embodiments, the L4 region of an adenoviral helper plasmid of the present disclosure comprises deletions which removes nucleotides encoding L4 100K abolish expression of L4 100K.

[0074] In some embodiments, an adenoviral helper plasmid of the present disclosure comprises a nucleotide sequence encoding L4 33K. In some embodiments, an adenoviral helper plasmid of the present disclosure comprises a nucleotide sequence encoding L4 22K. In some embodiments, an adenoviral helper plasmid of the present disclosure comprises a nucleotide sequence encoding L4 33K and L4 22K. In some embodiments, an adenoviral helper plasmid of the present disclosure comprises a nucleotide sequence encoding L4 33K and L4 22K modified such that L4 33K is not expressed. In some embodiments, an adenoviral helper plasmid of the present disclosure comprises a nucleotide sequence encoding L4 33K and L4 22K modified such that L4 22 K is not expressed.

[0075] In some embodiments, an adenoviral helper plasmid of the present disclosure comprises a native L4 region (~1379 bp in length). In some embodiments, an adenoviral helper plasmid of the present disclosure comprises an L4 expression construct (~1184 bp), referred to as +L4 in adenoviral helper plasmid designs (e.g., those as described herein), which has replaced the native polyA signal with the 49 bp synthetic polyA signal (SEQ ID NO: 108). In some embodiments, an adenoviral helper plasmid of the present disclosure comprises a nucleotide sequence encoding L4 33K. In some embodiments, an adenoviral helper plasmid of the present disclosure comprises a nucleotide sequence encoding L4 22K. In some embodiments, an adenoviral helper plasmid of the present disclosure comprises a nucleotide sequence encoding L4 33K and L4 22K. In some embodiments, an adenoviral helper plasmid of the present disclosure expresses L4 genes 33K and L4 22K from a native L4 promoter. In some embodiments, an adenoviral helper plasmid of the present disclosure comprises a nucleotide sequence encoding a native L4 promoter, 50 bp nucleotides upstream of the native promoter, L4 33K and L4 22K. In some embodiments the 50 bp nucleotides upstream of the native promoter are determined relative to a reference adenovirus sequence. In some embodiments a reference sequence is GenBank: M73260.1 (Ad5 sequence).

[0076] In some embodiments, an adenoviral helper plasmid of the present disclosure does not comprise an L4 region. In some embodiments, an adenoviral helper plasmid of the present disclosure does not comprise one or more nucleotide sequence(s) in an L4 region which encode one or more protein(s) (e.g., 33 k, 22 k, etc.). In some embodiments, an adenoviral helper plasmid of the present disclosure does not comprise a nucleotide sequence encoding L4 33K. In some embodiments, an adenoviral helper plasmid of the present disclosure does not comprise a nucleotide sequence encoding L4 22K.

[0077] In some embodiments an L4 region is provided in trans relative to an adenoviral helper plasmid. In some embodiments, an L4 region is provided in a producer cell. In some embodiments, a producer cell comprises a nucleotide sequence encoding an L4 region. In some embodiments, a producer cell comprises a nucleotide sequence encoding L4 proteins L4 33K and L4 22K. In some embodiments, a producer cell comprises a nucleotide sequence encoding L4 33K. In some embodiments, a producer cell comprises a nucleotide sequence encoding L4 22K.

[0078] In some embodiments, an L4 region or portions thereof is/are provided by a plasmid other than an adenoviral helper plasmid. In some embodiments the present disclosure provides an L4 trans plasmid. In some embodiments an L4 trans plasmid comprises an adenoviral L4 region. In some embodiments, an L4 trans plasmid of the present disclosure comprises one or more nucleotide sequence(s) in an L4 region which encode one or more protein(s) (e.g., 33 k, 22 k, etc.). In some embodiments, an L4 trans plasmid of the present disclosure provides one or more nucleotide sequence(s) in an L4 region which encode one or more protein(s) (e.g., 33 k, 22 k, etc.) on a plasmid other than an adenoviral helper plasmid. As in some embodiments the one or more nucleotide sequence(s) in an L4 region which encode one or more protein(s) (e.g., 33 k, 22 k, etc.) are not provided on the same plasmid (e.g., cis) as other adenoviral helper components the plasmid is referred to as an L4 trans plasmid.

[0079] In some embodiments, an L4 trans plasmid of the present disclosure comprises one or more nucleotide sequence(s) in an L4 region which encode and express one or more protein(s) (e.g., 33 k, 22 k, etc.). In some embodiments, an L4 trans plasmid of the present disclosure comprises a nucleotide sequence that encodes for and expresses L4 33 k and L422 k protein. In some embodiments, an L4 trans plasmid of the present disclosure comprises a nucleotide sequence that encodes for and expresses L4 33 k protein. In some embodiments, an L4 trans plasmid of the present disclosure comprises a nucleotide sequence that encodes for and expresses L4 22 k protein.

[0080] In some embodiments, an L4 trans plasmid of the present disclosure comprises a nucleotide sequence encoding L4 33K. In some embodiments, an L4 trans plasmid of the present disclosure comprises a nucleotide sequence encoding L4 22K. In some embodiments, an L4 trans plasmid of the present disclosure comprises a nucleotide sequence encoding L4 33K and L4 22K. In some embodiments, an L4 trans plasmid of the present disclosure comprises a nucleotide sequence encoding L4 33K and L4 22K modified such that L4 33K is not expressed. In some embodiments, an L4 trans plasmid of the present disclosure comprises a nucleotide sequence encoding L4 33K and L4 22K modified such that L4 22 K is not expressed.

[0081] In some embodiments, expression of proteins encoded by an L4 trans plasmid of the present disclosure is under the control of a promoter. In some embodiments, expression of proteins encoded by an L4 trans plasmid of the present disclosure is under the control of an EF1alpha promoter.

[0082] In some embodiments, an adenoviral helper plasmid of the present disclosure comprises an E2a region modified as illustrated in FIGS. 18 and/or 19 and/or 25.

### Fiber Gene

[0083] In some embodiments, an adenoviral helper plasmid of the present disclosure does not comprise a nucleotide sequence encoding adenoviral fiber protein. In some embodiments, an adenoviral helper plasmid does not comprise a nucleotide sequence encoding a full-length adenoviral fiber protein. In some embodiments, an adenoviral helper plasmid comprises a nucleotide sequence encoding a portion or fragment of adenoviral fiber protein. In some embodiments, an adenoviral helper plasmid comprises a nucleotide sequence that is at least 80%, 85%, 90%, 95%, 99%, or 100% identical to that of pXX6-80, excluding the nucleotide sequence encoding an adenoviral fiber protein.

### L1-52/55K (Packaging Protein 3) Gene

[0084] In some embodiments, an adenoviral helper plasmid of the present disclosure does not comprise a nucleotide sequence encoding a L1-52/55K (Packaging Protein 3) protein. In some embodiments, an adenoviral helper plasmid of the present invention does not comprise a nucleotide sequence encoding Peripentonal Hexon-Associated genes.

### L4 Region

[0085] In some embodiments, an adenoviral helper plasmid of the present disclosure comprises a complete L4 (hexon assembly) gene. In some embodiments, an adenoviral helper plasmid of the present disclosure comprises a nucleotide sequence encoding a complete L4 (hexon assembly). In some embodiments, an adenoviral helper plasmid of the present disclosure comprises a nucleotide sequence that is at least 80%, 85%, 90%, 95%, 99%, or 100% identical to SEQ ID NO: 3. In some embodiments, an adenoviral helper plasmid of the present disclosure comprises an amino acid sequence that is at least 80%, 85%, 90%, 95%, 99%, or 100% identical to SEQ ID NO: 4. In some embodiments, an adenoviral helper plasmid of the present invention comprises a complete L4 (33 kDa Ex2) gene. In some embodiments, an adenoviral helper plasmid of the present disclosure comprises a nucleotide sequence encoding a complete L4 (33 kDa Ex2). In some embodiments, an adenoviral helper plasmid of the present disclosure comprises a nucleotide sequence that is at least 80%, 85%, 90%, 95%, 99%, or 100% identical to SEQ ID NO: 5. In some embodiments, an adenoviral helper plasmid of the present disclosure comprises an amino acid sequence that is at least 80%, 85%, 90%, 95%. 99%, or 100% identical to SEQ ID NO: 6.

[0086] In some embodiments, an adenoviral helper plasmid of the present disclosure comprises a complete L4 Encapsidation Protein gene. In some embodiments, an adenoviral helper plasmid of the present disclosure comprises a nucleotide sequence encoding a complete L4 Encapsidation Protein. In some embodiments, an adenoviral helper plasmid of the present disclosure comprises a nucleotide sequence that is at least 80%, 85%, 90%, 95%, 99%, or 100% identical to SEQ ID NO: 7. In some embodiments, an adenoviral helper plasmid of the present disclosure comprises an amino acid sequence that is at least 80%, 85%, 90%, 95%, 99%, or 100% identical to SEQ ID NO: 8.

[0087] In some embodiments, an adenoviral helper plasmid of the present disclosure does not comprise an L4 (hexon assembly) gene. In some embodiments, an adenoviral helper plasmid does not comprise an L4 Encapsidation Protein gene. In some embodiments, an adenoviral helper plasmid does not comprise an L4 (hexon assembly) gene and does not comprise an L4 Encapsidation Protein gene. In some embodiments, an adenoviral helper plasmid of the present disclosure does not comprise a nucleotide sequence encoding L4 (hexon assembly). In some embodiments, an adenoviral helper plasmid does not comprise a nucleotide sequence encoding L4 Encapsidation Protein. In some embodiments, an adenoviral helper plasmid does not comprise a nucleotide sequence encoding L4 (hexon assembly) and does not comprise a nucleotide sequence encoding L4 Encapsidation Protein gene. In some embodiments, an adenoviral helper plasmid of the present disclosure comprises a nucleotide sequence encoding a fragment of L4 33 kDa Ex2. In some embodiments, an adenoviral helper plasmid of the present disclosure comprises a nucleotide sequence that is at least 80%, 85%, 90%, 95%, 99%, or 100% identical to SEQ ID NO: 9. In some embodiments, an adenoviral helper plasmid comprises a nucleotide sequence encoding a fragment of L4 33 kDa Ex2. In some embodiments, an adenoviral helper plasmid of the present disclosure comprises an amino acid sequence that is at least 80%, 85%, 90%, 95%, 99%, or 100% identical to SEQ ID NO: 10. In some embodiments, a nucleotide sequence encoding a fragment of L4 33 kDa Ex2 comprises an E2a promoter region (see, for example, Casper et al., “Identification of an adeno-associated virus Rep protein binding site in the adenovirus E2a promoter.” Journal of virology 79.1 (2005)). In some embodiments, an E2a promoter region has a nucleotide sequence that is at least 80%, 85%, 90%, 95%, 99%, or 100% identical to SEQ ID NO: 11. In some embodiments, an adenoviral helper plasmid does not comprise a nucleotide sequence encoding a fragment of L4 33 kDa Ex2. In some embodiments, an adenoviral helper plasmid does not comprise an E2a promoter region.

[0088] In some embodiments, an adenoviral helper plasmid of the present disclosure comprises a nucleotide sequence encoding a fragment of hexon-associated precursor (L4 pVIII). In some embodiments, an adenoviral helper plasmid comprises a nucleotide sequence that is at least 80%, 85%, 90%, 95%. 99%, or 100% identical to SEQ ID NO: 12. In some embodiments, an adenoviral helper plasmid comprises an amino acid sequence that is at least 80%, 85%, 90%, 95%, 99%, or 100% identical to SEQ ID NO: 13. In some embodiments, an adenoviral helper plasmid does not comprise a nucleotide sequence encoding hexon-associated precursor (L4 pVIII). In some embodiments. an adenoviral helper plasmid does not comprise a nucleotide sequence encoding a fragment of partial hexon-associated precursor (L4 pVIII).

### VA RNA Region

[0089] In some embodiments, an adenoviral helper plasmid of the present disclosure comprises a VA RNA region having a nucleotide sequence that is at least 80%, 85%, 90%, 95%, 99%, or 100% identical to SEQ ID NO: 14. In some embodiments, an adenoviral helper plasmid comprises a VA RNA region having a nucleotide sequence that is at least 80%, 85%, 90%, 95%, 99%, or 100% identical to SEQ ID NO: 15. In some embodiments, a VA RNA region comprises a VA RNAI gene having a sequence that is at least 80%, 85%, 90%, 95%, 99%, or 100% identical to SEQ ID NO: 16. In some embodiments, a VA RNA region comprises a VA RNAI gene having a sequence that is at least 80%, 85%, 90%, 95%, 99%, or 100% identical to SEQ ID NO: 17. In some embodiments, a VA RNA region comprises a VA RNAII gene having a sequence that is at least 80%, 85%, 90%, 95%, 99%, or 100% identical to SEQ ID NO: 18. In some embodiments, a VA RNA region comprises a VA RNAII gene having a sequence that is at least 80%, 85%, 90%, 95%, 99%, or 100% identical to SEQ ID NO: 19.

[0090] In some embodiments, an adenoviral helper plasmid of the present disclosure comprises a nucleotide sequence encoding a fragment of DNA Terminal Protein. In some embodiments, a nucleotide sequence encoding a fragment of DNA Terminal Protein is at least 80%, 85%, 90%, 95%, 99%, or 100% identical to SEQ ID NO: 20. In some embodiments, a fragment of DNA Terminal Protein has an amino acid sequence that is at least 80%, 85%, 90%, 95%, 99%, or 100% identical to SEQ ID NO: 21. In some embodiments, an adenoviral helper plasmid does not comprise a nucleotide sequence encoding DNA Terminal Protein. In some embodiments, an adenoviral helper plasmid comprises a nucleotide sequence encoding a fragment of 23 kDa endoprotease. In some embodiments, an adenoviral helper plasmid comprise a nucleotide sequence at least 80%, 85%, 90%, 95%, 99%, or 100% identical to SEQ ID NO: 22. In some embodiments, a fragment of 23 kDa endoprotease region has an amino acid sequence that is at least 80%, 85%, 90%, 95%, 99%, or 100% identical to SEQ ID NO: 23. In some embodiments, an adenoviral helper plasmid does not comprise a nucleotide sequence encoding 23 kDa endoprotease region.

### Introduction of Genes Encoding Supplementary Features

[0091] In some embodiments, an adenoviral helper plasmid of the present disclosure comprises an E2a gene. In some embodiments, an adenoviral helper plasmid of the present disclosure comprises a nucleotide sequence encoding E2a. In some embodiments, an adenoviral helper plasmid of the present disclosure comprises a nucleotide sequence that is at least 80%, 85%, 90%, 95%, 99%, or 100% identical to SEQ ID NO: 24. In some embodiments, an adenoviral helper plasmid of the present disclosure comprises an amino acid sequence that is at least 80%, 85%, 90%, 95%, 99%, or 100% identical to SEQ ID NO: 25. In some embodiments, expression of E2a is under the control of a promoter. In some embodiments, a nucleotide sequence encoding E2a is operably linked to a promoter. In some embodiments, a promoter is, for example, a CMV promoter, a PGK promoter, an SV40 promoter, an EF-1α promoter, a Ubc promoter. a CAG promoter, or a β-actin promoter. In some embodiments, a nucleotide sequence encoding E2a is operably linked to a transcriptional enhancer. In some embodiments, a transcriptional enhancer is, for example, a CMV enhancer. In some embodiments, a nucleotide sequence encoding E2a is operably linked to a regulatory intron. In some embodiments, expression of E2a is under the control of a chicken β-actin promoter. In some embodiments, a nucleotide sequence encoding E2a is operably linked to a chicken β-actin promoter. In some embodiments, a chicken β-actin promoter has a nucleotide sequence that is at least 80%, 85%, 90%, 95%, 99%, or 100% identical to SEQ ID NO: 26. In some embodiments, a chicken β-actin promoter is positioned upstream of a nucleotide sequence encoding E2a. In some embodiments, expression of E2a is under the control of an E2a promoter and a chicken β-actin promoter. In some embodiments, a nucleotide sequence encoding E2a is operably linked to an E2a promoter and a chicken β-actin promoter. In some embodiments, a chicken β-actin promoter is positioned upstream of an E2a promoter. In some embodiments, expression of E2a is under the control of chicken β-actin promoter and a CMV enhancer. In some embodiments, a nucleotide sequence encoding E2a is operably linked to a chicken β-actin promoter and a CMV enhancer. In some embodiments, a chicken β-actin promoter and a CMV enhancer are positioned upstream of an E2a promoter. In some embodiments, an adenoviral helper plasmid comprises an E2a polyadenylation signal. In some embodiments, an E2a polyadenylation signal is positioned downstream of a nucleotide sequence encoding E2a. In some embodiments, an E2a polyadenylation signal has a nucleotide sequence that is at least 80%, 85%, 90%, 95%, 99%, or 100% identical to SEQ ID NO: 27. In some embodiments, an adenoviral helper plasmid comprises an SV40 polyadenylation signal. In some embodiments, an SV40 polyadenylation signal is positioned downstream of a nucleotide sequence encoding E2a. In some embodiments, an SV40 polyadenylation signal is positioned downstream of an E2a polyadenylation signal. In some embodiments, an SV40 polyadenylation signal has a sequence that is at least 80%, 85%, 90%, 95%, 99%, or 100% identical to SEQ ID NO: 28.

[0092] In some embodiments, an adenoviral helper plasmid comprises a nucleotide sequence encoding UL30 derived from HSV-1. In some embodiments, a nucleotide sequence encoding UL30 has a nucleotide sequence that is at least 80%, 85%, 90%, 95%, 99%, or 100% identical to SEQ ID NO: 29. In some embodiments, an amino acid sequence UL30 is at least 80%, 85%, 90%, 95%. 99%, or 100% identical to SEQ ID NO: 30. In some embodiments, an adenoviral helper plasmid comprises a nucleotide sequence encoding UL42 derived from HSV-1. In some embodiments, a nucleotide sequence encoding UL42 has a nucleotide sequence that is at least 80%, 85%, 90%, 95%, 99%, or 100% identical to SEQ ID NO: 31. In some embodiments, an amino acid sequence of UL42 is at least 80%, 85%, 90%, 95%, 99%, or 100% identical to SEQ ID NO: 32. In some embodiments, an adenoviral helper plasmid comprises a nucleotide sequence encoding UL30 derived from HSV-1, and a nucleotide sequence encoding UL42 derived from HSV-1. In some embodiments, a nucleotide sequence encoding UL30 and a nucleotide sequence encoding UL42 are separated by a P2a cleavage site. In some embodiments, a P2a cleavage site has a nucleotide sequence that is at least 80%, 85%, 90%, 95%, 99%, or 100% identical to SEQ ID NO: 33. In some embodiments, a P2a cleavage site has an amino acid sequence that is at least 80%, 85%, 90%, 95%, 99%, or 100% identical to SEQ ID NO: 34. In some embodiments, expression of UL30 and/or UL42 gene is/are under the control of an EF-1α promoter. In some embodiments, a nucleotide sequence encoding UL30 is operably linked to a promoter. In some embodiments, a nucleotide sequence encoding UL30 is operably linked to a CMV promoter, a PGK promoter, an SV40 promoter, an EF-1α promoter, a Ubc promoter, a CAG promoter, or a β-actin promoter. In some embodiments, a nucleotide sequence encoding UL30 is operably linked to a transcriptional enhancer. In some embodiments, a transcriptional enhancer is, for example, a CMV enhancer. In some embodiments, a nucleotide sequence encoding UL30 is operably linked to a regulatory intron. In some embodiments a nucleotide sequence encoding UL42 and/or a nucleotide sequence encoding UL30 are operably linked to an EF-1α promoter. In some embodiments. an EF-1α promoter has a nucleotide sequence that is at least 80%, 85%, 90%, 95%, 99%, or 100% identical to SEQ ID NO: 35. In some embodiments, expression of UL30 and/or UL42 is/are under the control of an SV40 promoter. In some embodiments, a nucleotide sequence encoding UL42 and/or a nucleotide sequence encoding UL30 are operably linked to an SV40 promoter. In some embodiments, an SV40 promoter has a nucleotide sequence that is at least 80%, 85%, 90%, 95%, 99%, or 100% identical to SEQ ID NO: 51.

[0093] In some embodiments, an adenoviral helper plasmid comprises a polyadenylation signal. In some embodiments, a polyadenylation signal is synthetic. In some embodiments, a synthetic polyadenylation signal is a 49 bp synthetic polyadenylation signal (SEQ ID NO. 108).

[0094] In some embodiments, a polyadenylation signal is a β-globin polyadenylation signal, SV40 polyadenylation signal, or a Bovine Growth Hormone (bGH) polyadenylation signal. In some embodiments, an adenoviral helper plasmid comprises a polyadenylation signal downstream of a nucleotide sequence encoding UL42. In some embodiments, an adenoviral helper plasmid comprises a β-globin polyadenylation signal downstream of a nucleotide sequence encoding UL42. In some embodiments, a β-globin polyadenylation signal has a sequence that is at least 80%, 85%, 90%, 95%, 99%, or 100% identical to SEQ ID NO: 36. In some embodiments, an adenoviral helper plasmid comprises a Bovine Growth Hormone (bGH) polyadenylation signal downstream of a nucleotide sequence encoding UL42. In some embodiments, a bGH polyadenylation signal has a sequence that is at least 80%, 85%, 90%, 95%, 99%, or 100% identical to SEQ ID NO: 52.

### Exemplary Adenoviral Helper Plasmids

[0095] In some embodiments, an adenoviral helper plasmid of the present disclosure has a nucleotide sequence that is at least 80%, 85%, 90%, 95%, 99%, or 100% identical to SEQ ID NO: 41. In some embodiments, an adenoviral helper plasmid of the present disclosure comprises the following components having nucleotide sequences are at least 80%, 85%, 90%, 95%, 99%, or 100% identical to the indicated sequences: E4 mini promoter (SEQ ID NO: 1), L4 (Hexon Assembly) (SEQ ID NO: 3; SEQ ID NO: 4), L4 (33 kDa Ex2) (SEQ ID NO: 5; SEQ ID NO: 6), L4 Encapsidation Protein (22 kDa) (SEQ ID NO: 7; SEQ ID NO: 8), L4 pVIII Hexon-Associated Precursor (SEQ ID NO: 12; SEQ ID NO: 13), VA RNA region A (SEQ ID NO: 14), VA RNAI-A (SEQ ID NO: 16), VA RNAII-A (SEQ ID NO: 18), partial DNA Terminal Protein (SEQ ID NO: 20; SEQ ID NO: 21), 23 kDa endoprotease fragment region (SEQ ID NO: 22; SEQ ID NO: 23), and E2a (SEQ ID NO: 24; SEQ ID NO: 25), and does not comprise the following components: a fiber gene, an L1-52/55K (Packaging Protein 3) gene, and Peripentonal Hexon-Associated genes.

[0096] In some embodiments, an adenoviral helper plasmid of the present disclosure has a nucleotide sequence that is at least 80%, 85%, 90%, 95%, 99%, or 100% identical to SEQ ID NO: 42. In some embodiments, an adenoviral helper plasmid of the present disclosure comprises the following components having nucleotide sequences that are at least 80%, 85%, 90%, 95%, 99%, or 100% identical to the indicated sequences: E4 mini promoter (SEQ ID NO: 1), L4 (33 kDa Ex2) (SEQ ID NO: 9: SEQ ID NO: 10), VA RNA region A (SEQ ID NO: 14), VA RNAI-A (SEQ ID NO: 16). VA RNAII-A (SEQ ID NO: 18), partial DNA Terminal Protein (SEQ ID NO: 20; SEQ ID NO: 21), 23 kDa endoprotease fragment region (SEQ ID NO: 22; SEQ ID NO: 23), and E2a (SEQ ID NO: 24; SEQ ID NO: 25), and does not comprise or encode the following components: a fiber gene, an L1-52/55K (Packaging Protein 3) gene. Peripentonal Hexon-Associated genes, full-length L4 (Hexon Assembly) gene, L4 Encapsidation Protein, and L4 pVIII Hexon-Associated Precursor.

[0097] In some embodiments, an adenoviral helper plasmid of the present disclosure has a nucleotide sequence that is at least 80%, 85%, 90%, 95%, 99%, or 100% identical to SEQ ID NO: 43. In some embodiments, an adenoviral helper plasmid of the present disclosure comprises the following components having nucleotide sequences that are at least 80%, 85%, 90%, 95%, 99%, or 100% identical to the indicated sequences: E4 mini promoter (SEQ ID NO: 1), L4 (33 kDa Ex2) (SEQ ID NO: 9: SEQ ID NO: 10), VA RNA region B (SEQ ID NO: 15), VA RNAI-B (SEQ ID NO: 17). VA RNAII-B (SEQ ID NO: 19), and E2a (SEQ ID NO: 24; SEQ ID NO: 25), and does not comprise or encode the following components: a fiber gene, an L1-52/55K (Packaging Protein 3) gene, Peripentonal Hexon-Associated genes, full-length L4 (Hexon Assembly) gene, L4 Encapsidation Protein, L4 pVIII Hexon-Associated Precursor. DNA Terminal Protein, and 23 kDa endoprotease fragment region.

[0098] In some embodiments, an adenoviral helper plasmid of the present disclosure has a nucleotide sequence that is at least 80%, 85%, 90%, 95%, 99%, or 100% identical to SEQ ID NO: 44. In some embodiments, an adenoviral helper plasmid of the present disclosure comprises the following components having nucleotide sequences that are at least 80%, 85%, 90%, 95%, 99%, or 100% identical to the indicated sequences: E4 mini promoter (SEQ ID NO: 1), L4 (33 kDa Ex2) (SEQ ID NO: 9; SEQ ID NO: 10), VA RNA region A (SEQ ID NO: 14), VA RNAI-A (SEQ ID NO: 16), VA RNAII-A (SEQ ID NO: 18), partial DNA Terminal Protein (SEQ ID NO: 20; SEQ ID NO: 21), 23 kDa endoprotease fragment region (SEQ ID NO: 22; SEQ ID NO: 23), E2a (SEQ ID NO: 24; SEQ ID NO: 25). and a chicken β-actin promoter upstream of E2a, and does not comprise the following components: a fiber gene, an L1-52/55K (Packaging Protein 3) gene, Peripentonal Hexon-Associated genes, full-length L4 (Hexon Assembly) gene, L4 Encapsidation Protein, and L4 pVIII Hexon-Associated Precursor.

[0099] In some embodiments, an adenoviral helper plasmid of the present disclosure has a nucleotide sequence that is at least 80%, 85%, 90%, 95%, 99%, or 100% identical to SEQ ID NO: 45. In some embodiments, an adenoviral helper plasmid of the present disclosure comprises the following components having nucleotide sequences that are at least 80%, 85%, 90%, 95%, 99%, or 100% identical to the indicated sequences: E4 mini promoter (SEQ ID NO: 1), L4 (33 kDa Ex2) (SEQ ID NO: 9; SEQ ID NO: 10), VA RNA region B (SEQ ID NO: 15), VA RNAI-B (SEQ ID NO: 17), VA RNAII-B (SEQ ID NO: 19), E2a (SEQ ID NO: 24; SEQ ID NO: 25), and a chicken β-actin promoter upstream of E2a, and does not comprise or encode the following components: a fiber gene, an L1-52/55K (Packaging Protein 3) gene, Peripentonal Hexon-Associated genes, full-length L4 (Hexon Assembly) gene, L4 Encapsidation Protein, L4 pVIII Hexon-Associated Precursor, DNA Terminal Protein, and 23 kDa endoprotease fragment region.

[0100] In some embodiments, an adenoviral helper plasmid of the present disclosure has a nucleotide sequence that is at least 80%, 85%, 90%, 95%, 99%, or 100% identical to SEQ ID NO: 46. In some embodiments, an adenoviral helper plasmid of the present disclosure comprises the following components having nucleotide sequences that are at least 80%, 85%, 90%, 95%, 99%, or 100% identical to the indicated sequences: E4 mini promoter (SEQ ID NO: 1), L4 (33 kDa Ex2) (SEQ ID NO: 9; SEQ ID NO: 10), VA RNA region B (SEQ ID NO: 15), VA RNAI-B (SEQ ID NO: 17), VA RNAII-B (SEQ ID NO: 19), E2a (SEQ ID NO: 24; SEQ ID NO: 25), SV40 polyadenylation signal downstream of E2a (SEQ ID NO: 28). and a chicken β-actin promoter upstream of E2a, and does not comprise or encode the following components: a fiber gene, an L1-52/55K (Packaging Protein 3) gene, Peripentonal Hexon-Associated genes, full-length L4 (Hexon Assembly) gene, L4 Encapsidation Protein, L4 pVIII Hexon-Associated Precursor, DNA Terminal Protein, and 23 kDa endoprotease fragment region.

[0101] In some embodiments, an adenoviral helper plasmid of the present disclosure has a nucleotide sequence that is at least 80%, 85%, 90%, 95%, 99%, or 100% identical to SEQ ID NO: 47. In some embodiments, an adenoviral helper plasmid of the present disclosure comprises the following components having nucleotide sequences that are at least 80%, 85%, 90%, 95%, 99%, or 100% identical to the indicated sequences: E4 mini promoter (SEQ ID NO: 1), L4 (33 kDa Ex2) (SEQ ID NO: 9; SEQ ID NO: 10), VA RNA region A (SEQ ID NO: 14), VA RNAI-A (SEQ ID NO: 16), VA RNAII-A (SEQ ID NO: 18), partial DNA Terminal Protein (SEQ ID NO: 20: SEQ ID NO: 21), 23 kDa endoprotease fragment region (SEQ ID NO: 22; SEQ ID NO: 23). E2a (SEQ ID NO: 24; SEQ ID NO: 25). a chicken β-actin promoter upstream of E2a, an HSV-1-derived UL30 gene (SEQ ID NO: 29; SEQ ID NO: 30), an HSV-1-derived UL42 gene (SEQ ID NO: 31; SEQ ID NO: 32), EF-1α promoter (SEQ ID NO: 35) upstream of UL30. and a R-globin polyadenylation signal (SEQ ID NO: 36) downstream of UL42, and does not comprise or encode the following components: a fiber gene, an L1-52/55K (Packaging Protein 3) gene, Peripentonal Hexon-Associated genes, full-length L4 (Hexon Assembly) gene, L4 Encapsidation Protein, and L4 pVIII Hexon-Associated Precursor.

[0102] In some embodiments, an adenoviral helper plasmid of the present disclosure has a nucleotide sequence that is at least 80%, 85%, 90%, 95%, 99%, or 100% identical to SEQ ID NO: 48. In some embodiments, an adenoviral helper plasmid of the present disclosure comprises the following components having nucleotide sequences that are at least 80%, 85%, 90%, 95%, 99%, or 100% identical to the indicated sequences: E4 mini promoter (SEQ ID NO: 1), L4 (33 kDa Ex2) (SEQ ID NO: 9; SEQ ID NO: 10), VA RNA region A (SEQ ID NO: 14), VA RNAI-A (SEQ ID NO: 16), VA RNAII-A (SEQ ID NO: 18), partial DNA Terminal Protein (SEQ ID NO: 20; SEQ ID NO: 21), 23 kDa endoprotease fragment region (SEQ ID NO: 22; SEQ ID NO: 23), E2a (SEQ ID NO: 24; SEQ ID NO: 25), a chicken β-actin promoter upstream of E2a, an HSV-1-derived UL30 gene (SEQ ID NO: 29; SEQ ID NO: 30), an HSV-1-derived UL42 gene (SEQ ID NO: 31; SEQ ID NO: 32), SV40 promoter (SEQ ID NO: 51) upstream of UL30, and a Bovine Growth Hormone (bGH) polyadenylation signal (SEQ ID NO: 52) downstream of UL42, and does not comprise or encode the following components: a fiber gene, an L1-52/55K (Packaging Protein 3) gene, Peripentonal Hexon-Associated genes, full-length L4 (Hexon Assembly) gene, L4 Encapsidation Protein, and L4 pVIII Hexon-Associated Precursor.

[0103] In some embodiments, an adenoviral helper plasmid of the present disclosure has a nucleotide sequence that is at least 80%, 85%, 90%, 95%, 99%, or 100% identical to SEQ ID NO: 49. In some embodiments, an adenoviral helper plasmid of the present disclosure comprises the following components having nucleotide sequences that are at least 80%, 85%, 90%, 95%, 99%, or 100% identical to the indicated sequences: SV40 promoter upstream of E4 region (SEQ ID NO: 2), VA RNA region B (SEQ ID NO: 15), VA RNAI-B (SEQ ID NO: 17), VA RNAII-B (SEQ ID NO: 19), E2a (SEQ ID NO: 24; SEQ ID NO: 25), SV40 polyadenylation signal downstream of E2a (SEQ ID NO: 28), SV40 polyadenylation signal downstream of E4orf6 (SEQ ID NO: 50), and a chicken β-actin promoter upstream of E2a. and does not comprise or encode the following components: a fiber gene, an L1-52/55K (Packaging Protein 3) gene, Peripentonal Hexon-Associated genes, full-length L4 (Hexon Assembly) gene, L4 Encapsidation Protein, L4 pVIII Hexon-Associated Precursor, L4 (33 kDa Ex2), DNA Terminal Protein, and 23 kDa endoprotease fragment region, E4 mini promoter upstream of E4 region, a gene encoding E4orf1, a gene encoding E4orf2, and a gene encoding E4orf3.

[0104] In some embodiments, an adenoviral helper plasmid of the present disclosure has a nucleotide sequence that is at least 80%, 85%, 90%, 95%, 99%, or 100% identical to SEQ ID NO: 94. In some embodiments, an adenoviral helper plasmid is designed to include “B2” designs comprising a SV40 polyA site to potentially increase expression of E2A and a synthesized sequence of a smaller VA region (contains Ad2 VA RNA I and VA RNA II) that does not contain the flanking Ad Terminal Protein nor Endoprotease gene sequences. In some embodiments, this region was synthesized with flanking StuI and BsrGI sites and the insert was cloned into pEMBR-1.2 to make pEMBR-1.2B2 (e.g., SEQ ID NO: 94).]

[0105] In some embodiments, adenoviral helper plasmids as described herein are 11000 bp or fewer. In some embodiments, adenoviral helper plasmids as described herein are 10000 bp or fewer. In some embodiments, adenoviral helper plasmids as described herein are 9500 bp or fewer. In some embodiments, adenoviral helper plasmids as described herein are 9000 bp or fewer, In some embodiments, adenoviral helper plasmids as described herein are 8000 bp or fewer. In some embodiments, adenoviral helper plasmids as described herein are 7500 bp or fewer. In some embodiments, adenoviral helper plasmids as described herein are 7000 bp or fewer.

[0106] In some embodiments, an L4 trans plasmid comprises a nucleotide sequence that is at least 80%, 85%, 90%, 95%, 99%, or 100% identical to SEQ ID NO: 115. In some embodiments, an L4 trans plasmid comprises a nucleotide sequence that is at least 80%, 85%, 90%, 95%, 99%, or 100% identical to SEQ ID NO: 119. In some embodiments, an L4 trans plasmid comprises a nucleotide sequence that is at least 80%, 85%, 90%, 95%, 99%, or 100% identical to SEQ ID NO: 8.

### Methods of Production

[0107] In some embodiments, an adenoviral helper plasmid of the present disclosure is useful in methods of producing rAAV. In some embodiments, an adenoviral helper plasmid and an L4 trans plasmid of the present disclosure are useful in methods of producing rAAV. In some embodiments. rAAV is produced by transfection of a producer cell. In some embodiments, a producer cell is a mammalian cell. In some embodiments, a producer cell is a transformed mammalian cell. In some embodiments, a producer cell is a Vero, HeLa, HEK293, HEK293T cell or derivative thereof.

[0108] In some embodiments, an L4 region is provided in a producer cell. In some embodiments, a producer cell comprises a nucleotide sequence encoding an L4 region. In some embodiments, a producer cell comprises a nucleotide sequence encoding L4 proteins L4 33K and L4 22K. In some embodiments, a producer cell comprises a nucleotide sequence encoding L4 33K. In some embodiments, a producer cell comprises a nucleotide sequence encoding L4 22K. In some embodiments, a method of producing a rAAV comprises transfection of a producer cell with an AAV vector plasmid, an AAV Rep-Cap expressing plasmid. and an adenoviral helper plasmid. In some embodiments, a method of producing a rAAV comprises transfection of a producer cell with an AAV vector plasmid, an AAV Rep-Cap expressing plasmid, an adenoviral helper plasmid, and an L4 trans plasmid. In some embodiments, a method of producing a rAAV comprises transfection of a producer cell with an AAV vector plasmid. an AAV Rep-Cap expressing plasmid, an adenoviral helper plasmid comprising an L4 region, and an L4 trans plasmid. In some embodiments, a method of producing a rAAV comprises transfection of a producer cell with an AAV vector plasmid, an AAV Rep-Cap expressing plasmid, an adenoviral helper plasmid comprising an L4 region, and an L4 trans plasmid comprising a nucleotide sequence encoding L4 22K. In some embodiments, a method of producing a rAAV comprises transfection of a producer cell with an AAV vector plasmid, an AAV Rep-Cap expressing plasmid, an adenoviral helper plasmid comprising an L4 region, and an L4 trans plasmid comprising a nucleotide sequence encoding L4 33K. In some embodiments, a method of producing a rAAV comprises transfection of a producer cell with an AAV vector plasmid, an AAV Rep-Cap expressing plasmid, and an adenoviral helper plasmid comprising an L4 region, wherein the producer cell comprises a nucleotide sequence encoding an L4 region or portions thereof (e.g., L33K and/or L22K).

[0109] In some embodiments, an AAV vector plasmid comprises AAV inverted terminal repeats (ITRs) and a transgene of interest. In some embodiments, an adenoviral helper plasmid is any adenoviral helper plasmid described herein. In some embodiments, an L4 trans plasmid is any L4 trans plasmid as described herein.

[0110] In some embodiments, a method of producing a rAAV comprises transfection of a producer cell stably expressing Rep-Cap. In some embodiments, a method of producing a rAAV comprises transfection of a producer cell stably expressing Rep-Cap with an AAV vector plasmid and an adenoviral helper plasmid. In some embodiments, a method of producing a rAAV comprises transfection of a producer cell stably expressing Rep-Cap with an AAV vector plasmid, an adenoviral helper plasmid and an L4 trans plasmid. In some embodiments, a method of producing a rAAV comprises transfection of a producer cell stably expressing Rep-Cap with an AAV vector plasmid, an adenoviral helper plasmid comprising an L4 region, and an L4 trans plasmid. In some embodiments, a method of producing a rAAV comprises transfection of a producer cell stably expressing Rep-Cap with an AAV vector plasmid, an adenoviral helper plasmid comprising an L4 region, and an L4 trans plasmid comprising a nucleotide sequence encoding L4 22K. In some embodiments, a method of producing a rAAV comprises transfection of a producer cell stably expressing Rep-Cap with an AAV vector plasmid, an adenoviral helper plasmid comprising an L4 region, and an L4 trans plasmid comprising a nucleotide sequence encoding L4 33K. In some embodiments, a method of producing a rAAV comprises transfection of a producer cell stably expressing Rep-Cap and comprising a nucleotide sequence encoding an L4 region or portions thereof (e.g., L33K and/or L22K) with an AAV vector plasmid, an AAV Rep-Cap expressing plasmid. and an adenoviral helper plasmid comprising an L4 region.

[0111] In some embodiments, an AAV vector plasmid comprises AAV inverted terminal repeats (ITRs) and a transgene of interest. In some embodiments, an adenoviral helper plasmid is any adenoviral helper plasmid described herein. In some embodiments, an L4 trans plasmid is any L4 trans plasmid as described herein.

### EXEMPLIFICATION

[0112] The main purpose of the work described in this disclosure is to develop novel adenoviral helper plasmids for rAAV production that are smaller, contain fewer non-necessary adenoviral genes, and that function as well or better than the most commonly used adenoviral helper plasmids.

[0113] The plasmids provided in this disclosure were synthesized de novo, were sequence-verified, and were scaled up for use in large-scale rAAV manufacturing. Production of rAAV studies were performed to compare vector yields when using the provided plasmids versus other commercially available adenoviral helper plasmids. Vector quality and activity were also assessed from rAAV produced with the different adenoviral helper plasmids to confirm that rAAV produced with the provided plasmids is at least equivalent, if not superior in quality. Taken together, these following examples demonstrate that provided adenoviral helper plasmids generate rAAV of high yield and quality, in a potentially safer and more cost-effective design.

### Example 1: Exemplary Methods for the Production of rAAVs Using Adenoviral Helper Plasmids Described Herein

[0114] HEK293 cells were transfected with a control adenoviral helper plasmid (e.g., a commercially available plasmid, such as pALD-X80, or an adenoviral helper plasmid described in herein). The adenoviral helper plasmid was co-transfected along with pAAVrep2cap9 and pAAV-CMV-GFP or pAAV-CAG-GFP plasmids using PEI transfection in order to generate AAV9/GFP. Four days post-transfection, the HEK293 cells were harvested via 0.5% Triton X-100 lysis and nuclease addition (to degrade RNA, cellular genomic DNA, and remaining plasmid DNA). After 3-4 hours of lysis/nuclease treatment, the cell lysate was sampled and submitted for qPCR titer analysis. Samples were treated with another nuclease, then EDTA and heat-treated, followed by qPCR of diluted samples to determine vector genome copy number per sample. As a metric of transfection efficiency, cells positive for GFP were quantified using fluorescence microscopy.

### Example 2: Adenoviral Helper Plasmid Lacking Fiber, L1-52/55K, and Peripentonal Hexon-Associated Genes, and Having a Partial L4 Hexon-Associated Precursor

[0115] To reduce the size of the adenoviral helper plasmid, an adenoviral helper plasmid (pEMBR-1.2: SEQ ID NO: 41) was designed which lacks the fiber gene, the L1-52/55K (Packaging Protein 3) gene, and most of the Hexon Associated Precursor, as well as the Peripentonal Hexon-Associated protein. These deletions were made relative to commercially available helper plasmids, such as pXX6-80. The Adenoviral helper genes were synthesized and assembled into a kanamycin-resistant plasmid backbone. The resulting plasmid is approximately 6.7 kb smaller than pXX6-80.

[0116] The adenoviral helper plasmid described above enabled the production of AAV in HEK293 cells. No major difference in AAV vector yield was observed between cells transfected with pALD-X80, and cells transfected with pEMBR-1.2 as measured by qPCR (See FIG. 2). rAAV vector produced with pEMBR-1.2 produces anormal vector with the correct ratios of the VP proteins, as observed when assessing vector capsid purity by SDS-PAGE (See FIG. 3), and the correct size of packaged transgene, as observed when assessing vector transgene purity by alkaline gel electrophoresis (See FIG. 3). Further. pEMBR-1.2 enabled the production of a fully functional vector capable of transfecting cells. No difference was observed in the transfection of HEK293 cells to generate AAVRH.10/ssCMV-GFP produced with pALD-X80 or pEMBR-1.2 (See FIG. 4).

### Example 3: Modifications to the E2a Region of Adenoviral Helper Plasmids to Reduce Plasmid Size while Maintaining Production of AAV

[0117] In order to further reduce the size of adenoviral helper plasmids (e.g., those as described herein), adenoviral helper plasmids were designed with modifications to the E2a region. These plasmids were designed to contain the VA RNA region from pEMBR-1.2B2 (SEQ ID NO: 70) and the E4 region from pEMBR-1.2 (SEQ ID NO: 41) with various modifications to the E2a region based on the promoter regions identified by Guilfoyle (GEP) and Jing (JEP) (See FIG. 14). The sequence modifications to the E2a region based on the GEP and JEP promoters are depicted in FIG. 12 and the sequence modifications to the E2a region based on truncations to the NotI end of the pEMBR1.2B2 E2a region are depicted in FIG. 13.

[0118] These plasmids were tested for the ability to produce AAV in a large volume of 500 mL culture (See FIG. 15A-B). In large volume, pEMR-1.2B2-GEP+1 kbp (SEQ ID NO: 81) outperformed pEMBR-1.2B2-GEP (SEQ ID NO: 80). Rep52 and E2a protein expression was also assessed in these plasmids (See FIG. 15C). These data demonstrate that Rep52 is present at a similar level in all constructs tested, and E2a protein expression is likely correlated with AAV production. Although the JEP+1 kbp plasmid had E2a protein produced at normal levels, it is missing sequence encoding the L4 (33K and 22K) region.

[0119] Further testing was performed to analyze AAV production with various constructs in 75 mL culture (See FIG. 16). These data show that there is likely little difference in AAV production between pEMBR-1.2B2 (SEQ ID NO:70), pEMBR-1.2B2-GEP+50 bp (SEQ ID NO: 82), and pEMBR-1.2B2-GEP+50 bp+Kozak (SEQ ID NO: 83). The JEP+NotIΔ1.5 kbp which does not contain the GEP promoter nor L4 (33K and 22K) region produced AAV at a low level.

[0120] A table depicting which elements are included in various plasmids (e.g., those as described herein) and ability to produce E2a protein and AAV is shown in FIG. 17. Without wishing to be bound by any particular theory, these data indicate that the L4 region (containing 33K and 22K ORFs). JEP/GEP regional requirements. and adequate E2a production is important for the production of AAV.

### Example 4: Exemplary Engineered Adenoviral Helper Plasmids to Reduce Plasmid Size while Maintaining Production of AAV

[0121] In order to further reduce the size of adenoviral helper plasmids (e.g., those as described herein), adenoviral helper plasmids were designed with modifications to the L4 region, in particular. These plasmids were designed with various modifications to the L4 region (See FIGS. 18-19). The sequence modifications to the L4 region are depicted in FIG. 21. The ability of these plasmids to produce AAV from 75 mL culture were assessed (See FIG. 22). Without wishing to be bound by any particular theory, these data demonstrate that only a construct comprising nucleotide sequence for E4 ORFs 4&6 may be required to maintain AAV production. Without wishing to be bound by any particular theory, these data also demonstrate that adding the sequence for the L4 region (containing 33K and 22K ORFs) with the synthetic polyA tail rescues AAV production in constructs which previously did not produce AAV.

[0122] Further testing was performed to analyze AAV production in various constructs with and without the L4 region (containing 33K and 22K ORFs) with the synthetic polyA tail, in comparison to AAV production with pEMBR-1.2B2 where plasmid size is also shown (See FIG. 23). The addition of the L4 region (containing 33K and 22K ORFs) with the synthetic polyA tail to plasmids which previously did not produce AAV resulted in rescued AAV production. An exemplary adenoviral plasmid map is depicted in FIG. 24 which has been engineered (e.g., with modifications as described herein) to reduce plasmid size while maintaining production of AAV.

[0123] Additionally, this Example describes adenoviral helper plasmids that have been engineered to reduce plasmid size while maintaining production of AAV. The E2a region has been engineered in plasmids described in this example to include native E2a ORF and native E2a poly A tail, the L4 region consisting of 50 bp upstream of native L4 promoter, native L4 promoter, and 33 kDa and 22 kDa ORFs (See FIG. 25). A fragment of the L4 33 kDa Ex 2 comprising an E2a promoter region has been repeated for E2a expression. The E2a region has been engineered in plasmids described in this example to not contain L3 23 kDa viral endoprotease. Hexon Assembly, L4 100K region, nor L4 pVIII Hexon Associated Precursor proteins.

### Example 5: Introduction of Supplementary Accessory Genes to Modified Adenoviral Helper Plasmids

[0124] This Example describes the removal of adenoviral helper genes which results in a smaller adenoviral helper plasmid and allows for the addition of supplementary genes to further improve AAV quality and yield. Specifically, various pEMBR plasmids of various sizes and comprising various supplementary genes (e.g., UL30, UL42, etc.) will be designed from pEMBR backbone plasmids (e.g., those as described herein) and tested AAV production. The HSV-1 DNA polymerase genes (UL30 and UL42) will be added back to plasmids to help replicate the AAV transgene, even when cells are not in S phase. The supplementary genes will be designed to be made as a single transcript. Any number of promoters could be used, including CBA, CMV, PGK, etc. and any number of polyA sites could be used. The direction in which the construct is cloned into the plasmid should theoretically not affect expression because this region will contain both promoter and polyA signal which induces expression of supplementary genes independent from the rest of the plasmid.

[0125] Vector yields for AAV (e.g., AAV9) in clarified lysate will be measured by qPCR with various pEMBR plasmids designed to comprise various supplementary genes (e.g., UL30, UL42, etc.; See pEMBR-1.5A+L4 in FIG. 23).

### Example 6: Provision of L4 Region Sequence in Trans Rescues AAV Production

[0126] This Example demonstrates that provision of L4 region sequences, e.g., L4 33K and/or L4 22K, in trans (i.e., not included in the adenoviral helper plasmid containing VA RNA. an E4 region, and an E2a region) can rescue and/or increase production of AAV.

[0127] In the present example, a quadruple transfection was performed to add the L4 trans plasmid encoding the L4 region to cells in trans. Adding the L4 region in trans restored rAAV production to wild-type (pEMBR-1.2B2) levels regardless of whether the native promoter driven L4 (L4_pUC57) or an exogenously driven (by human elongation factor 1 alpha, Ef1αL4_pUC57) L4 was added (FIG. 28A).

[0128] To determine which L4 protein was more essential, we also utilized plasmids with natively driven codon-optimized 22K or 33K (22K_pUC57 and 33K_pUC57). Our results indicated that 22K was more essential to rAAV production; however, it appeared that the L4 region proteins' effect on production was additive (FIG. 28A). Analysis of E2a protein by western blot revealed a slight decrease in E2a protein when 22K was present (FIG. 28B).

[0129] To further test the rescue and/or increase AAV production, L4 gene dosage by adding additional copies of L4 region proteins was performed. The current example used for rAAV production was achieved by quadruple transfection of producer cells. The E2a region of the helper plasmids used in the quadruple transfection are shown in FIG. 29A. FIG. 29B shows average rAAV titer (VG/mL) from triplicate 75 mL quadruple plasmid transfected cultures determined by qPCR for the E2a constructs indicated plus the pUC57 vector containing the specified L4 construct to compare L4 gene dosage of 1X L4 genes, 2X L4 genes, 1X 33K with 2X 22K, and 2X 33K with 1X 22K against the control condition (wild type plus empty vector; 1.2B2+pUC57). Rep and E2a expression levels resulting from the transfections described in FIG. 29B are shown in FIG. 29C. Beta-actin is shown as a loading control. Adenovirus type 5 infected HEK293/HEK293T cells are shown as a positive control and uninfected/nontransfected HEK293 cells are shown as a negative control. Notably, in some conditions the provision of an additional copy of the L4 region (e.g., 1.2B2+L4_pUC57) resulted in increased rAAV titer. Further, provision of additional copies of 33K resulted in increased rAAV titer in several varying conditions. See FIG. 29B.

### Example 7: Table of Sequences

[0130] The below Table of Sequences lists and describes the various sequences discussed herein. Unless stated otherwise, all sequences are recited with 5′ to 3′ directionality of the positive strand of a plasmid. This directionality is preserved irrespective of the orientation of a gene or element described to be associated with a sequence. Asterisks as used herein indicate a stop codon.

Lengthy table referenced here
US20260201418A1-20260716-T00001
Please refer to the end of the specification for access instructions.

### EQUIVALENTS

[0131] Those skilled in the art will recognize, or be able to ascertain using no more than routine experimentation, many equivalents to the specific embodiments of the invention described herein. The scope of the present invention is not intended to be limited to the above Description, but rather is as set forth in the following claims:

LENGTHY TABLES
The patent application contains a lengthy table section. A copy of the table is available in electronic form from the USPTO web site (https://seqdata.uspto.gov/docdetail?docId=US20260201418A1). An electronic copy of the table will also be available from the USPTO upon request and payment of the fee set forth in 37 CFR 1.19(b)(3).

We claim:

1. An adenoviral helper plasmid comprising a nucleotide sequence encoding:
(a) E2a protein;
(b) an E4 region; and
(c) a VA RNA region;
wherein the adenoviral helper plasmid does not comprise a nucleotide sequence encoding one or more of:
a Fiber protein or portion thereof;
a L1-52/55K (Packaging Protein 3); and
a Peripentonal Hexon-Associated Protein.

2. The adenoviral plasmid of claim 1, further comprising an engineered L4 region

3. The adenoviral plasmid of claim 2, wherein the engineered L4 region does not express an L4 100K protein.

4. The adenoviral plasmid of claim 2, wherein the engineered L4 region does not comprise a complete L4 100K encoding nucleotide sequence.

5. The adenoviral plasmid of claim 4, wherein the engineered L4 region does not comprise base pairs 24061-25961 relative to GenBank Accession Number M73260.

6. The adenoviral plasmid of claim 2, wherein the engineered L4 region comprises at least one nucleotide sequence encoding L4-33K at least 80% identical to SEQ ID: NO. 5.

7. The adenoviral plasmid of claim 6, wherein the engineered L4 region comprises two nucleotide sequences encoding L4-33K at least 80% identical to SEQ ID: NO. 5.

8. The adenoviral plasmid of claim 2, wherein the engineered L4 region comprises a nucleotide sequence encoding L4-22K at least 80% identical to SEQ ID: NO. 7.

9. The adenoviral plasmid of claim 2, wherein the engineered L4 region comprises a nucleotide sequence encoding L4-33K and a nucleotide sequence encoding L4-22K.

10. The adenoviral plasmid of claim 9, wherein the engineered L4 region comprises 50 nucleotides upstream of the L4-33K/22K region.

11. The adenoviral plasmid of claim 10, wherein the 50 nucleotides upstream of the L4-33K/22K region is identified relative to the L4-33K/22K region of GenBank Accession Number M73260.

12. The adenoviral plasmid of claim 11, further comprising a synthetic polyA signal downstream of the L4-33K/22K region.

13. The adenoviral plasmid of claim 1, wherein the adenoviral helper plasmid does not comprise a nucleotide sequence encoding L3 23 kDa viral endoprotease.

14. The adenoviral plasmid of claim 1, wherein the adenoviral helper plasmid does not comprise a nucleotide sequence encoding L4 pVIII.

15. The adenoviral helper plasmid of claim 9, wherein the engineered L4 region comprises a nucleotide sequence comprising an E2a promoter region upstream of the nucleotide sequence encoding L4-33K and the nucleotide sequence encoding L4-22K.

16. The adenoviral helper plasmid of claim 1, wherein the adenoviral helper plasmid does not comprise a nucleotide sequence encoding DNA Terminal Protein.

17. The adenoviral helper plasmid of claim 1, wherein expression of E2a protein is under the control of an E2a promoter.

18. The adenoviral helper plasmid of claim 1, wherein expression of E2a protein is under the control of an E2a promoter and a chicken D-actin promoter, wherein the chicken D-actin promoter is upstream of the E2a promoter.

19. The adenoviral helper plasmid of claim 1, wherein expression of E2a protein is under the control of the chicken D-actin promoter.

20. The adenoviral helper plasmid of claim 18 or 19, wherein in the chicken β-actin promoter has a nucleotide sequence that is at least 80% identical to SEQ ID. No: 26.

21. The adenoviral helper plasmid of claim 1, wherein the adenoviral helper plasmid comprises an E2a polyadenylation signal downstream of E2a.

22. The adenoviral helper plasmid of claim 1, wherein the adenoviral helper plasmid contains an SV40 polyadenylation signal downstream of E2a.

23. The adenoviral helper plasmid of claim 20, wherein the SV40 polyadenylation signal is downstream of an E2a polyadenylation signal.

24. The adenoviral helper plasmid of claim 21 or 20, wherein the SV40 polyadenylation signal has a sequence that is at least 80% identical to SEQ ID. No: 28.

25. The adenoviral helper plasmid of claim 1, wherein the adenoviral helper plasmid further comprises nucleotide sequences encoding HSV-1 UL30 and HSV-1 UL42,
wherein at least one of the nucleotide sequences is at least 80% identical to SEQ ID NO: 29;
wherein at least one of the nucleotide sequences is at least 80% identical to SEQ ID NO: 31;
wherein UL30 and UL42 are separated by a P2A cleavage site encoded by a nucleic acid sequence that is at least 80% identical to SEQ ID NO: 33.

26. The adenoviral helper plasmid of claim 1, wherein the adenoviral helper plasmid further comprises nucleotide sequences encoding HSV-1 UL29/ICP8.

27. The adenoviral helper plasmid of any one of claim 23 and XX, wherein the HSV-1 UL30; UL42; and UL29 are separated by a P2A cleavage site encoded by a nucleic acid sequence that is at least 80% identical to SEQ ID NO: 139

28. The adenoviral helper plasmid of claim 1, wherein the E4 region does not comprise E4orf1, and wherein the E4 region does not comprise E4orf2.

29. The adenoviral helper plasmid of claim 1, wherein the E4 region is operably linked to the E4 mini promoter, wherein the E4 mini promoter has a nucleotide sequence that is at least 80% identical to SEQ ID NO: 1.

30. The adenoviral helper plasmid of claim 1, wherein the E4 region is operably linked to the SV40 promoter, wherein the SV40 promoter has a nucleotide sequence that is at least 80% identical to SEQ ID NO: 2.

31. The adenoviral helper plasmid of any of the above claims, wherein the adenoviral helper plasmid comprises a resistance gene.

32. The adenoviral helper plasmid of claim 31, wherein the resistance cassette is a kanamycin resistance gene.

33. An adenoviral helper plasmid having 80% sequence identity to any one of SEQ ID NO: 80-105.

34. An adenoviral helper plasmid comprising an engineered E2A region comprising any one of nucleotide sequences SEQ ID NO: 106 or SEQ ID NO: 112.

35. The adenoviral helper plasmid of claim 1 or claim 2, wherein the adenoviral helper plasmid does not comprise a nucleotide sequence encoding L4 33K.

36. The adenoviral helper plasmid of claim 1 or claim 2, wherein the adenoviral helper plasmid does not comprise a nucleotide sequence encoding L4 22K.

37. The adenoviral helper plasmid of claim 1 or claim 2, wherein the adenoviral helper plasmid does not comprise a nucleotide sequence encoding L4 22K and does not comprise a nucleotide sequence encoding L4 33K.

38. An L4 trans plasmid comprising a nucleotide sequence encoding an engineered L4 region.

39. The L4 trans plasmid of claim 38, wherein the engineered L4 region comprises a nucleotide sequence encoding L4 at least 80% identical to SEQ ID NO. 115.

40. The L4 trans plasmid of claim 38, wherein the engineered L4 region comprises a nucleotide sequence encoding L4-33K at least 80% identical to SEQ ID NO. 120.

41. The L4 trans plasmid of claim 38, wherein the engineered L4 region comprises a nucleotide sequence encoding L4-22K at least 80% identical to SEQ ID NO. 7.

42. A composition comprising:
an adenoviral helper plasmid of any one of claims 35, 36, or 37; and
an L4 trans plasmid of any one of claims 38-41.

43. A method of producing a recombinant adenoviral associated viral vector comprising:
transfecting a producer cell with an AAV vector plasmid, an AAV Rep-Cap expressing plasmid, and the adenoviral helper plasmid of any one of claims 1-37.

44. The method of claim 43, wherein the AAV vector plasmid comprises AAV inverted terminal repeats (ITRs) and a transgene of interest.

45. The method of claim 43, wherein the method further comprises transfecting a producer cell with an L4 trans plasmid of any one of claims 38-41.

46. The method of any one of claim 43-45 wherein both the L4 trans plasmid and the adenoviral helper plasmid comprise an engineered L4 region.

47. The method of claim 46, wherein the engineered L4 region of the L4 trans plasmid comprises a nucleotide sequence encoding L33K.

48. A method of producing a recombinant adenoviral associated viral vector comprising:
transfecting a producer cell with an AAV vector plasmid and the adenoviral helper plasmid of any one of claims 1-37, wherein the producer cell stably expresses Rep-Cap and comprises a nucleotide sequence encoding an L4 region or portion thereof.

49. The method of claim 48, wherein the AAV vector plasmid comprises AAV inverted terminal repeats (ITRs) and a transgene of interest.

50. The method of claim 49, wherein the method further comprises transfecting a producer cell with an L4 trans plasmid of any one of claims 38-41.

51. A method of producing a recombinant adenoviral associated viral vector comprising:
transfecting a producer cell with an AAV vector plasmid, an AAV Rep-Cap expressing plasmid, the adenoviral helper plasmid of any one of claims 1-37, and an L4 trans plasmid.

52. The method of 51 wherein, the L4 trans plasmid comprises a nucleotide sequence encoding L33K.

53. The method of 51 wherein, the producer cell a nucleotide sequence encoding an L4 region or portion thereof.

The application's sequence listing, which the Patent Office published only in electronic form, follows.

SEQUENCE LISTING (134 sequences)

SEQ ID NO: 1 - DNA, 239 bp, synthetic construct
  source 1..239: mol_type = other DNA
cccttttgccttcactgctaaactccttcaacacccaaaaaaccgaaagcaaagacccgcatccaagcgcacgccaaaagacccacaaaaaacacctgaaattggcaatgcagtaaaaaatcaggatatatatgagcgagacgtgaaccgggaaaaaatgtgacactgactaactcgaccacggcacagctcaccacaaaaaaattatccaaaagaaaaaatgaccattccgactgaca

SEQ ID NO: 2 - DNA, 330 bp, synthetic construct
  source 1..330: mol_type = other DNA
cacacagtcaatcccacacctttcaggggtccgaggggtcgtccgtcttcatacgtttcgtacgtagagttaatcagtcgttggtccacacctttcaggggtccgaggggtcgtccgtcttcatacgtttcgtacgtagagttaatcagtcgttggtatcagggcggggattgaggcgggtagggcggggattgaggcgggtcaaggcgggtaagaggcggggtaccgactgattaaaaaaaataaatacgtctccggctccggcggagccggagactcgataaggtcttcatcactcctccgaaaaaacctccggatccgaaaacgttt

SEQ ID NO: 3 - DNA, 3006 bp, synthetic construct
  source 1..3006: mol_type = other DNA
atgcccttctcccacgcagacacgatcggcacactcagcgggttcatcaccgtaatttcactttccgcttcgctgggctcttcctcttcctcttgcgtccgcataccacgcgccactgggtcgtcttcattcagccgccgcactgtgcgcttacctcctttgccatgcttgattagcaccggtgggttgctgaaacccaccatttgtagcgccacatcttctctttcttcctcgctgtccacgattacctctggtgatggcgggcgctcgggcttgggagaagggcgcttctttttcttcttgggcgcaatggccaaatccgccgccgaggtcgatggccgcgggctgggtgtgcgcggcaccagcgcgtcttgtgatgagtcttcctcgtcctcggactcgatacgccgcctcatccgcttttttgggggcgcccggggaggcggcggcgacggggacggggacgacacgtcctccatggttgggggacgtcgcgccgcaccgcgtccgcgctcgggggtggtttcgcgctgctcctcttcccgactggccatttccttctcctataggcagaaaaagatcatggagtcagtcgagaagaaggacagcctaaccgccccctctgagttcgccaccaccgcctccaccgatgccgccaacgcgcctaccaccttccccgtcgaggcacccccgcttgaggaggaggaagtgattatcgagcaggacccaggttttgtaagcgaagacgacgaggaccgctcagtaccaacagaggataaaaagcaagaccaggacaacgcagaggcaaacgaggaacaagtcgggcggggggacgaaaggcatggcgactacctagatgtgggagacgacgtgctgttgaagcatctgcagcgccagtgcgccattatctgcgacgcgttgcaagagcgcagcgatgtgcccctcgccatagcggatgtcagccttgcctacgaacgccacctattctcaccgcgcgtaccccccaaacgccaagaaaacggcacatgcgagcccaacccgcgcctcaacttctaccccgtatttgccgtgccagaggtgcttgccacctatcacatctttttccaaaactgcaagatacccctatcctgccgtgccaaccgcagccgagcggacaagcagctggccttgcggcagggcgctgtcatacctgatatcgcctcgctcaacgaagtgccaaaaatctttgagggtcttggacgcgacgagaagcgcgcggcaaacgctctgcaacaggaaaacagcgaaaatgaaagtcactctggagtgttggtggaactcgagggtgacaacgcgcgcctagccgtactaaaacgcagcatcgaggtcacccactttgcctacccggcacttaacctaccccccaaggtcatgagcacagtcatgagtgagctgatcgtgcgccgtgcgcagcccctggagagggatgcaaatttgcaagaacaaacagaggagggcctacccgcagttggcgacgagcagctagcgcgctggcttcaaacgcgcgagcctgccgacttggaggagcgacgcaaactaatgatggccgcagtgctcgttaccgtggagcttgagtgcatgcagcggttctttgctgacccggagatgcagcgcaagctagaggaaacattgcactacacctttcgacagggctacgtacgccaggcctgcaagatctccaacgtggagctctgcaacctggtctcctaccttggaattttgcacgaaaaccgccttgggcaaaacgtgcttcattccacgctcaagggcgaggcgcgccgcgactacgtccgcgactgcgtttacttatttctatgctacacctggcagacggccatgggcgtttggcagcagtgcttggaggagtgcaacctcaaggagctgcagaaactgctaaagcaaaacttgaaggacctatggacggccttcaacgagcgctccgtggccgcgcacctggcggacatcattttccccgaacgcctgcttaaaaccctgcaacagggtctgccagacttcaccagtcaaagcatgttgcagaactttaggaactttatcctagagcgctcaggaatcttgcccgccacctgctgtgcacttcctagcgactttgtgcccattaagtaccgcgaatgccctccgccgctttggggccactgctaccttctgcagctagccaactaccttgcctaccactctgacataatggaagacgtgagcggtgacggtctactggagtgtcactgtcgctgcaacctatgcaccccgcaccgctccctggtttgcaattcgcagctgcttaacgaaagtcaaattatcggtacctttgagctgcagggtccctcgcctgacgaaaagtccgcggctccggggttgaaactcactccggggctgtggacgtcggcttaccttcgcaaatttgtacctgaggactaccacgcccacgagattaggttctacgaagaccaatcccgcccgcctaatgcggagcttaccgcctgcgtcattacccagggccacattcttggccaattgcaagccatcaacaaagcccgccaagagtttctgctacgaaagggacggggggtttacttggacccccagtccggcgaggagctcaacccaatccccccgccgccgcagccctatcagcagcagccgcgggcccttgcttcccaggatggcacccaaaaagaagctgcagctgccgccgccacccacggacgaggaggaatactgggacagtcaggcagaggaggttttggacgaggaggaggaggacatgatggaagactgggagagcctagacgaggaagcttccgaggtcgaagaggtgtcagacgaaacaccgtcaccctcggtcgcattcccctcgccggcgccccagaaatcggcaaccggttccagcatggctacaacctccgctcctcaggcgccgccggcactgcccgttcgccgacccaaccgtag

SEQ ID NO: 4 - protein, 1001 aa, synthetic construct
MPFSHADTIGTLSGFITVISLSASLGSSSSSCVRIPRATGSSSFSRRTVRLPPLPCLISTGGLLKPTICSATSSLSSSLSTITSGDGGRSGLGEGRFFFFLGAMAKSAAEVDGRGLGVRGTSASCDESSSSSDSIRRLIRFFGGARGGGGDGDGDDTSSMVGGRRAAPRPRSGVVSRCSSSRLAISFSYRQKKIMESVEKKDSLTAPSEFATTASTDAANAPTTFPVEAPPLEEEEVIIEQDPGFVSEDDEDRSVPTEDKKQDQDNAEANEEQVGRGDERHGDYLDVGDDVLLKHLQRQCAIICDALQERSDVPLAIADVSLAYERHLFSPRVPPKRQENGTCEPNPRLNFYPVFAVPEVLATYHIFFQNCKIPLSCRANRSRADKQLALRQGAVIPDIASLNEVPKIFEGLGRDEKRAANALQQENSENESHSGVLVELEGDNARLAVLKRSIEVTHFAYPALNLPPKVMSTVMSELIVRRAQPLERDANLQEQTEEGLPAVGDEQLARWLQTREPADLEERRKLMMAAVLVTVELECMQRFFADPEMQRKLEETLHYTFRQGYVRQACKISNVELCNLVSYLGILHENRLGQNVLHSTLKGEARRDYVRDCVYLFLCYTWQTAMGVWQQCLEECNLKELQKLLKQNLKDLWTAFNERSVAAHLADIIFPERLLKTLQQGLPDFTSQSMLQNFRNFILERSGILPATCCALPSDFVPIKYRECPPPLWGHCYLLQLANYLAYHSDIMEDVSGDGLLECHCRCNLCTPHRSLVCNSQLLNESQIIGTFELQGPSPDEKSAAPGLKLTPGLWTSAYLRKFVPEDYHAHEIRFYEDQSRPPNAELTACVITQGHILGQLQAINKARQEFLLRKGRGVYLDPQSGEELNPIPPPPQPYQQQPRALASQDGTQKEAAAAAATHGRGGILGQSGRGGFGRGGGGHDGRLGEPRRGSFRGRRGVRRNTVTLGRIPLAGAPEIGNRFQHGYNLRSSGAAGTARSPTQP

SEQ ID NO: 5 - DNA, 369 bp, synthetic construct
  source 1..369: mol_type = other DNA
gcccatactgcaccggcggcagcggcagcaacagcagcggccacacagaagcaaaggcgaccggatagcaagactctgacaaagcccaagaaatccacagcggcggcagcagcaggaggaggagcgctgcgtctggcgcccaacgaacccgtatcgacccgcgagcttagaaacaggatttttcccactctgtatgctatatttcaacagagcaggggccaagaacaagagctgaaaataaaaaacaggtctctgcgatccctcacccgcagctgcctgtatcacaaaagcgaagatcagcttcggcgcacgctggaagacgcggaggctctcttcagtaaatactgcgcgctgactcttaaggactag

SEQ ID NO: 6 - protein, 122 aa, synthetic construct
AHTAPAAAAATAAATQKQRRPDSKTLTKPKKSTAAAAAGGGALRLAPNEPVSTRELRNRIFPTLYAIFQQSRGQEQELKIKNRSLRSLTRSCLYHKSEDQLRRTLEDAEALFSKYCALTLKD

SEQ ID NO: 7 - DNA, 585 bp, synthetic construct
  source 1..585: mol_type = other DNA
atggcacccaaaaagaagctgcagctgccgccgccacccacggacgaggaggaatactgggacagtcaggcagaggaggttttggacgaggaggaggaggacatgatggaagactgggagagcctagacgaggaagcttccgaggtcgaagaggtgtcagacgaaacaccgtcaccctcggtcgcattcccctcgccggcgccccagaaatcggcaaccggttccagcatggctacaacctccgctcctcaggcgccgccggcactgcccgttcgccgacccaaccgtagatgggacaccactggaaccagggccggtaagtccaagcagccgccgccgttagcccaagagcaacaacagcgccaaggctaccgctcatggcgcgggcacaagaacgccatagttgcttgcttgcaagactgtgggggcaacatctccttcgcccgccgctttcttctctaccatcacggcgtggccttcccccgtaacatcctgcattactaccgtcatctctacagcccatactgcaccggcggcagcggcagcaacagcagcggccacacagaagcaaaggcgaccggatag

SEQ ID NO: 8 - protein, 194 aa, synthetic construct
MAPKKKLQLPPPPTDEEEYWDSQAEEVLDEEEEDMMEDWESLDEEASEVEEVSDETPSPSVAFPSPAPQKSATGSSMATTSAPQAPPALPVRRPNRRWDTTGTRAGKSKQPPPLAQEQQQRQGYRSWRGHKNAIVACLQDCGGNISFARRFLLYHHGVAFPRNILHYYRHLYSPYCTGGSGSNSSGHTEAKATG

SEQ ID NO: 9 - DNA, 87 bp, synthetic construct
  source 1..87: mol_type = other DNA
cacaaaagcgaagatcagcttcggcgcacgctggaagacgcggaggctctcttcagtaaatactgcgcgctgactcttaaggactag

SEQ ID NO: 10 - protein, 28 aa, synthetic construct
HKSEDQLRRTLEDAEALFSKYCALTLKD

SEQ ID NO: 11 - DNA, 36 bp, synthetic construct
  source 1..36: mol_type = other DNA
attctcagtcgcgcgtcataaatgacttctctcgga

SEQ ID NO: 12 - DNA, 110 bp, synthetic construct
  source 1..110: mol_type = other DNA
atgagcaaggaaattcccacgccctacatgtggagttaccagccacaaatgggacttgcggctggagctgcccaagactactcaacccgaataaactacatgagcgcggg

SEQ ID NO: 13 - protein, 36 aa, synthetic construct
MSKEIPTPYMWSYQPQMGLAAGAAQDYSTRINYMSA

SEQ ID NO: 14 - DNA, 513 bp, synthetic construct
  source 1..513: mol_type = other DNA
tatccgtagatgtacctggacatccaggtgatgccggcggcggtggtggaggcgcgcggaaagtcgcggacgcggttccagatgttgcgcagcggcaaaaagtgctccatggtcgggacgctctggccggtcaggcgcgcgcaatcgttgacgctctagcgtgcaaaaggagagcctgtaagcgggcactcttccgtggtctggtggataaattcgcaagggtatcatggcggacgaccggggttcgagccccgtatccggccgtccgccgtgatccatgcggttaccgcccgcgtgtcgaacccaggtgtgcgacgtcagacaacgggggagtgctccttttggcttccttccaggcgcggcggctgctgcgctagcttttttggccactggccgcgcgcagcgtaagcggttaggctggaaagcgaaagcattaagtggctcgctccctgtagccggagggttattttccaagggttgagtcgcgggacccccggttcgagtctcggaccg

SEQ ID NO: 15 - DNA, 730 bp, synthetic construct
  source 1..730: mol_type = other DNA
atccgtagatgtacctggacatccaggtgatgccggcggcggtggtggaggcgcgcggaaagtcgcggacgcggttccagatgttgcgcagcggcaaaaagtgctccatggtcgggacgctctggccggtgaggcgtgcgcagtcgttgacgctctagaccgtgcaaaaggagagcctgtaagcgggcactcttccgtggtctggtggataaattcgcaagggtatcatggcggacgaccggggttcgaaccccggatccggccgtccgccgtgatccatgcggttaccgcccgcgtgtcgaacccaggtgtgcgacgtcagacaacgggggagcgctccttttggcttccttccaggcgcggcggctgctgcgctagcttttttggccactggccgcgcgcggcgtaagcggttaggctggaaagcgaaagcattaagtggctcgctccctgtagccggagggttattttccaagggttgagtcgcaggacccccggttcgagtctcgggccggccggactgcggcgaacgggggtttgcctccccgtcatgcaagaccccgcttgcaaattcctccggaaacagggacgagccccttttttgcttttcccagatgcatccggtgctgcggcagatgcgcccccctcctcagcagcggcaagagcaagagcagcggcagacatgcagggcaccctccccttctcctaccgcgtcaggaggggcaacatc

SEQ ID NO: 16 - DNA, 163 bp, synthetic construct
  source 1..163: mol_type = other DNA
agcgggcactcttccgtggtctggtggataaattcgcaagggtatcatggcggacgaccggggttcgagccccgtatccggccgtccgccgtgatccatgcggttaccgcccgcgtgtcgaacccaggtgtgcgacgtcagacaacgggggagtgctcctttt

SEQ ID NO: 17 - DNA, 163 bp, synthetic construct
  source 1..163: mol_type = other DNA
agcgggcactcttccgtggtctggtggataaattcgcaagggtatcatggcggacgaccggggttcgaaccccggatccggccgtccgccgtgatccatgcggttaccgcccgcgtgtcgaacccaggtgtgcgacgtcagacaacgggggagcgctcctttt

SEQ ID NO: 18 - DNA, 74 bp, synthetic construct
  source 1..74: mol_type = other DNA
ggctcgctccctgtagccggagggttattttccaagggttgagtcgcgggacccccggttcgagtctcggaccg

SEQ ID NO: 19 - DNA, 161 bp, synthetic construct
  source 1..161: mol_type = other DNA
ggctcgctccctgtagccggagggttattttccaagggttgagtcgcaggacccccggttcgagtctcgggccggccggactgcggcgaacgggggtttgcctccccgtcatgcaagaccccgcttgcaaattcctccggaaacagggacgagcccctttt

SEQ ID NO: 20 - DNA, 699 bp, synthetic construct
  source 1..699: mol_type = other DNA
tacctcgtgaaaaacggcgacgcgttgtagaccttggcgcaggcgctgaaaggcgcgcggaggtggtggcggcggccgtagtggacctacaggtccatgtagatgcctatagtagcggaatacaaccttctagagcgggggcctcggggccggtgggatgcgaccggggagatggcggtcggcggcggcgtgaaaaaccaccctatggtcatggaccacgcctgaacgttgctgatgcataaactgagctcccgaatgagcgcagagtccatgtggctcgagagcgtcggcccagtggtctggcaattgaccaggcaataccggttgacgtgaatgtggtagttgtgcccgcgtatggtggcgaaacacctgtacctactgaaggtcagatgggagtgcgtccacgtcgtccggtataatcggctcgcgcaacagcggctggatcgggacgaagtcggctactccccgaagccccagtgtgcgtaccctccttctcccgcggtggatgccggtttgaggcggcggcggcgtcgctatctacgttctctacgtcctgttctccttcctcttcttcttcacggccatctttccgagtacgttctgatgatgtttctggacgcggctacagttttgcttcggaccccgtaccggctggcggacgcgtaagtcgtccggcctgggttcctgtaccacgaagac

SEQ ID NO: 21 - protein, 233 aa, synthetic construct
MEHFLPLRNIWNRVRDFPRASTTAAGITWMSRYIYGYHRLMLEDLAPGAPATLRWPLYRQPPPHFLVGYQYLVRTCNDYVFDSRAYSRLRYTELSQPGHQTVNWSVMANCTYTINTGAYHRFVDMDDFQSTLTQVQQAILAERVVADLALLQPMRGFGVTRMGGRGRHLRPNSAAAAAIDARDAGQEEGEEEVPVERLMQDYYKDLRRCQNEAWGMADRLRIQQAGPKDMVLL

SEQ ID NO: 22 - DNA, 473 bp, synthetic construct
  source 1..473: mol_type = other DNA
ccgagactgggggcgtacactggatggcctttgcctggaacccgcactcaaaaacatgctacctctttgagccctttggcttttctgaccagcgactcaagcaggtttaccagtttgagtacgagtcactcctgcgccgtagcgccattgcttcttcccccgaccgctgtataacgctggaaaagtccacccaaagcgtacaggggcccaactcggccgcctgtggactattctgctgcatgtttctccacgcctttgccaactggccccaaactcccatggatcacaaccccaccatgaaccttattaccggggtacccaactccatgctcaacagtccccaggtacagcccaccctgcgtcgcaaccaggaacagctctacagcttcctggagcgccactcgccctacttccgcagccacagtgcgcagattaggagcgccacttctttttgtcacttgaaaaacatgtaa

SEQ ID NO: 23 - protein, 204 aa, synthetic construct
MGSSEQELKAIVKDLGCGPYFLGTYDKRFPGFVSPHKLACAIVNTAGRETGGVHWMAFAWNPRSKTCYLFEPFGFSDQRLKQVYQFEYESLLRRSAIASSPDRCITLEKSTQSVQGPNSAACGLFCCMFLHAFANWPQTPMDHNPTMNLITGVPNSMLNSPQVQPTLRRNQEQLYSFLERHSPYFRSHSAQIRSATSFCHLKNM

SEQ ID NO: 24 - DNA, 1590 bp, synthetic construct
  source 1..1590: mol_type = other DNA
taccggtcagcccttctcctcgtcgcgctttggtgggggctcgcgcctgcgccacgccgcgctgcagggggttggtacctcctgcacagcaggggcaggggcagcggcggcggaggggcccgcgggggttttttcgcctactccgccgcatagctcaggctcctgctccttctgagtagtgttctgcgcgaccacggcgcgtgtgggtcgggcgccggtagctggagccgccgcctaaaccggtaacgcgggttcttctttttcttcgcgggaagagggttcgggctcgcgggcggtagtggtctccattagcacctgtcgctccttctttctcttctacaccgcgatgtttaccacccaaagtcgttgggtggccacgattagttcgtaccgtttcctccattcgcgtgtcacgccgccgacttacttctgctgggtcaccgcgcaccatacgcctgcgttctccttctccttctcgggtcgcttcgcctttcactttaatgccactacttgggcgactcacacggctagcacagacgcaccctcttcccgtacctccgacgcgcgcgcgactacctgttcatggtgcacctattgctagatttccgcttgaagtttgatgacggactggttcaccttcgagaccgccggcatacgttctggaccgacttgctcctcgtggcgcccaacgtcgactggaagtggtcgttgttctggaaacactgctactaccccgctaaggacgtccgcatggacgtcagcaaacgtctccactggatgttcgtagtgctcgggtgcccgacgcgcaacaccgacgtggcgacgcgactctagcttccgctcgaattcacagatgtgccttcgtaatactatttattcctcgtgcactaactttacctacactgctcgcttttgcccgtcgcgcgcgacttcctcgtcagatcgttccggttctagcacttcttggccaccccggctttacaccacgtctagaggttgtggctgcgttccacgacgcacgtgctgcgccggacaggccggttagtcaaaaggccgttcagaacgccgtacaagaagagacttccgcgtttccgagtccaccgaaaattcgtctagttccgaaaatacgtccgcgacataggattgcgggtctggcccgtgccagtggaaaactacggtgatgccacgctcacgttgagtttcggacccgtgcgcgggaaaaacccttccgtcgatggtttcaactgaggcaagcgggactcgttgcgcctcctggacctgcgcctagactagaggctgttctcgcacgaccggtcgcacgtggtgggccgcgactatcacaaggtcacgacgttgggacacatagcgttgagcgcgcgcgtcccgcctccggggttgacgctgaagttctatagccgcgggctggacgatttgcgcaaccactaccacgcgtcggacacctcacttttgaagtggctcgacggcgcctaccaacacggactcaaattcacctcgtgatttgtggtcatagcgttgcacagggacggtcaccgcgtatcgctacgcgccgtcttggggaaactaaaaatt

SEQ ID NO: 25 - protein, 529 aa, synthetic construct
MASREEEQRETTPERGRGAARRPPTMEDVSSPSPSPPPPRAPPKKRMRRRIESEDEEDSSQDALVPRTPSPRPSTSAADLAIAPKKKKKRPSPKPERPPSPEVIVDSEEEREDVALQMVGFSNPPVLIKHGKGGKRTVRRLNEDDPVARGMRTQEEEEEPSEAESEITVMNPLSVPIVSAWEKGMEAARALMDKYHVDNDLKANFKLLPDQVEALAAVCKTWLNEEHRGLQLTFTSNKTFVTMMGRFLQAYLQSFAEVTYKHHEPTGCALWLHRCAEIEGELKCLHGSIMINKEHVIEMDVTSENGQRALKEQSSKAKIVKNRWGRNVVQISNTDARCCVHDAACPANQFSGKSCGMFFSEGAKAQVAFKQIKAFMQALYPNAQTGHGHLLMPLRCECNSKPGHAPFLGRQLPKLTPFALSNAEDLDADLISDKSVLASVHHPALIVFQCCNPVYRNSRAQGGGPNCDFKISAPDLLNALVMVRSLWSENFTELPRMVVPEFKWSTKHQYRNVSLPVAHSDARQNPFDF

SEQ ID NO: 26 - DNA, 278 bp, synthetic construct
  source 1..278: mol_type = other DNA
agctccactcggggtgcaagacgaagtgagaggggtagaggggggggaggggtgggggttaaaacataaataaataaaaaattaataaaacacgtcgctacccccgccccccccccccccccgcgcgcggtccgccccgccccgccccgctccccgccccgccccgctccgcctctccacgccgccgtcggttagtctcgccgcgcgaggctttcaaaggaaaataccgctccgccgccgccgccgccgggatatttttcgcttcgcgcgccgcccgc

SEQ ID NO: 27 - DNA, 35 bp, synthetic construct
  source 1..35: mol_type = other DNA
tgccgcgtctgccgttcccacccccatttattagt

SEQ ID NO: 28 - DNA, 135 bp, synthetic construct
  source 1..135: mol_type = other DNA
gatccagacatgataagatacattgatgagtttggacaaaccacaactagaatgcagtgaaaaaaatgctttatttgtgaaatttgtgatgctattgctttatttgtaaccattataagctgcaataaacaagtt

SEQ ID NO: 29 - DNA, 3705 bp, synthetic construct
  source 1..3705: mol_type = other DNA
atgttttccggtggcggcggcccgctgtcccccggaggaaagtcggcggccagggcggcgtccgggttttttgcgcccgccggccctcgcggagccagccggggacccccgccttgtttgaggcaaaacttttacaacccctacctcgccccagtcgggacgcaacagaagccgaccgggccaacccagcgccatacgtactatagcgaatgcgatgaatttcgattcatcgccccgcgggtgctggacgaggatgcccccccggagaagcgcgccggggtgcacgacggtcacctcaagcgcgcccccaaggtgtactgcgggggggacgagcgcgacgtcctccgcgtcgggtcgggcggcttctggccgcggcgctcgcgcctgtggggcggcgtggaccacgccccggcggggttcaaccccaccgtcaccgtctttcacgtgtacgacatcctggagaacgtggagcacgcgtacggcatgcgcgcggcccagttccacgcgcggtttatggacgccatcacaccgacggggaccgtcatcacgctcctgggcctgactccggaaggccaccgggtggccgttcacgtttacggcacgcggcagtacttttacatgaacaaggaggaggtcgacaggcacctacaatgccgcgccccacgagatctctgcgagcgcatggccgcggccctgcgcgagtccccgggcgcgtcgttccgcggcatctccgcggaccacttcgaggcggaggtggtggagcgcaccgacgtgtactactacgagacgcgccccgctctgttttaccgcgtctacgtccgaagcgggcgcgtgctgtcgtacctgtgcgacaacttctgcccggccatcaagaagtacgagggtggggtcgacgccaccacccggttcatcctggacaaccccgggttcgtcaccttcggctggtaccgtctcaaaccgggccggaacaacacgctagcccagccgcgggccccgatggccttcgggacatccagcgacgtcgagtttaactgtacggcggacaacctggccatcgaggggggcatgagcgacctaccggcatacaagctcatgtgcttcgatatcgaatgcaaggcggggggggaggacgagctggcctttccggtggccgggcacccggaggacctggtcatccagatatcctgtctgctctacgacctgtccaccaccgccctggagcacgtcctcctgttttcgctcggttcctgcgacctccccgaatcccacctgaacgagctggcggccaggggcctgcccacgcccgtggttctggaattcgacagcgaattcgagatgctgttggccttcatgacccttgtgaaacagtacggccccgagttcgtgaccgggtacaacatcatcaacttcgactggcccttcttgctggccaagctgacggacatttacaaggtccccctggacgggtacggccgcatgaacggccggggcgtgtttcgcgtgtgggacataggccagagccacttccagaagcgcagcaagataaaggtgaacggcatggtgaacatcgacatgtacgggattataaccgacaagatcaagctctcgagctacaagctcaacgccgtggccgaagccgtcctgaaggacaagaagaaggacctgagctatcgcgacatccccgcctactacgccgccgggcccgcgcaacgcggggtgatcggcgagtactgcatacaggattccctgctggtgggccagctgttttttaagtttttgccccatctggagctctcggccgtcgcgcgcttggcgggtattaacatcacccgcaccatctacgacggccagcagatccgcgtctttacgtgcctgctgcgcctggccgaccagaagggctttattctgccggacacccaggggcgatttaggggcgccgggggggaggcgcccaagcgtccggccgcagcccgggaggacgaggagcggccagaggaggagggggaggacgaggacgaacgcgaggagggcgggggcgagcgggagccggagggcgcgcgggagaccgccggcaggcacgtggggtaccagggggccagggtccttgaccccacttccgggtttcacgtgaaccccgtggtggtgttcgactttgccagcctgtaccccagcatcatccaggcccacaacctgtgcttcagcacgctctccctgagggccgacgcagtggcgcacctggaggcgggcaaggactacctggagatcgaggtgggggggcgacggctgttcttcgtcaaggctcacgtgcgagagagcctcctcagcatcctcctgcgggactggctcgccatgcgaaagcagatccgctcgcggattccccagagcagccccgaggaggccgtgctcctggacaagcagcaggccgccatcaaggtcgtgtgtaactcggtgtacgggttcacgggagtgcagcacggactcctgccgtgcctgcacgttgccgcgacggtgacgaccatcggccgcgagatgctgctcgcgacccgcgagtacgtccacgcgcgctgggcggccttcgaacagctcctggccgatttcccggaggcggccgacatgcgcgcccccgggccctattccatgcgcatcatctacggggacacggactccatctttgtgctgtgccgcggcctcacggccgccgggctgacggccgtgggcgacaagatggcgagccacatctcgcgcgcgctgtttctgccccccatcaaactcgagtgcgaaaagacgttcaccaagctgctgctgatcgccaagaaaaagtacatcggcgtcatctacgggggtaagatgctcatcaagggcgtggatctggtgcgcaaaaacaactgcgcgtttatcaaccgcacctccagggccctggtcgacctgctgttttacgacgataccgtctccggagccgccgcggcgttagccgagcgccccgcggaggagtggctggcgcgacccctgcccgagggactgcaggcgttcggggccgtcctcgtagacgcccatcggcgcatcaccgacccggagagggacatccaggactttgtcctcaccgccgaactgagcagacacccgcgcgcgtacaccaacaagcgcctggcccacctgacggtgtattacaagctcatggcccgccgcgcgcaggtcccgtccatcaaggaccggatcccgtacgtgatcgtggcccagacccgcgaggtagaggagacggtcgcgcggctggccgccctccgcgagctagacgccgccgccccaggggacgagcccgccccccccgcggccctgccctccccggccaagcgcccccgggagacgccgtcgcctgccgaccccccgggaggcgcgtccaagccccgcaagctgctggtgtccgagctggccgaggatcccgcatacgccattgcccacggcgtcgccctgaacacggactattacttctcccacctgttgggggcggcgtgcgtgacattcaaggccctgtttgggaataacgccaagatcaccgagagtctgttaaaaaggtttattcccgaagtgtggcaccccccggacgacgtggccgcgcggctccggaccgcagggttcggggcggtgggtgccggcgctacggcggaggaaactcgtcgaatgttgcatagagcctttgatactctagca

SEQ ID NO: 30 - protein, 1235 aa, synthetic construct
MFSGGGGPLSPGGKSAARAASGFFAPAGPRGASRGPPPCLRQNFYNPYLAPVGTQQKPTGPTQRHTYYSECDEFRFIAPRVLDEDAPPEKRAGVHDGHLKRAPKVYCGGDERDVLRVGSGGFWPRRSRLWGGVDHAPAGFNPTVTVFHVYDILENVEHAYGMRAAQFHARFMDAITPTGTVITLLGLTPEGHRVAVHVYGTRQYFYMNKEEVDRHLQCRAPRDLCERMAAALRESPGASFRGISADHFEAEVVERTDVYYYETRPALFYRVYVRSGRVLSYLCDNFCPAIKKYEGGVDATTRFILDNPGFVTFGWYRLKPGRNNTLAQPRAPMAFGTSSDVEFNCTADNLAIEGGMSDLPAYKLMCFDIECKAGGEDELAFPVAGHPEDLVIQISCLLYDLSTTALEHVLLFSLGSCDLPESHLNELAARGLPTPVVLEFDSEFEMLLAFMTLVKQYGPEFVTGYNIINFDWPFLLAKLTDIYKVPLDGYGRMNGRGVFRVWDIGQSHFQKRSKIKVNGMVNIDMYGIITDKIKLSSYKLNAVAEAVLKDKKKDLSYRDIPAYYAAGPAQRGVIGEYCIQDSLLVGQLFFKFLPHLELSAVARLAGINITRTIYDGQQIRVFTCLLRLADQKGFILPDTQGRFRGAGGEAPKRPAAAREDEERPEEEGEDEDEREEGGGEREPEGARETAGRHVGYQGARVLDPTSGFHVNPVVVFDFASLYPSIIQAHNLCFSTLSLRADAVAHLEAGKDYLEIEVGGRRLFFVKAHVRESLLSILLRDWLAMRKQIRSRIPQSSPEEAVLLDKQQAAIKVVCNSVYGFTGVQHGLLPCLHVAATVTTIGREMLLATREYVHARWAAFEQLLADFPEAADMRAPGPYSMRIIYGDTDSIFVLCRGLTAAGLTAVGDKMASHISRALFLPPIKLECEKTFTKLLLIAKKKYIGVIYGGKMLIKGVDLVRKNNCAFINRTSRALVDLLFYDDTVSGAAAALAERPAEEWLARPLPEGLQAFGAVLVDAHRRITDPERDIQDFVLTAELSRHPRAYTNKRLAHLTVYYKLMARRAQVPSIKDRIPYVIVAQTREVEETVARLAALRELDAAAPGDEPAPPAALPSPAKRPRETPSPADPPGGASKPRKLLVSELAEDPAYAIAHGVALNTDYYFSHLLGAACVTFKALFGNNAKITESLLKRFIPEVWHPPDDVAARLRTAGFGAVGAGATAEETRRMLHRAFDTLA

SEQ ID NO: 31 - DNA, 1461 bp, synthetic construct
  source 1..1461: mol_type = other DNA
acggattcccctggcggtgtggcccccgcctcccccgtggaggacgcgtcggacgcgtccctcgggcagccggaggagggggcgccctgccaggtggtcctgcagggcgccgaacttaatggaatcctacaggcgtttgccccgctgcgcacgagccttctggactcgcttctggttatgggcgaccggggcatccttatccataacacgatctttggggagcaggtgttcctgcccctggaacactcgcaattcagtcggtatcgctggcgcggacccacggcggcgttcctgtctctcgtggaccagaagcgctccctcctgagcgtgtttcgcgccaaccagtacccggacctacgtcgggtggagttggcgatcacgggccaggccccgtttcgcacgctggttcagcgcatatggacgacgacgtccgacggcgaggccgttgagctagccagcgagacgctgatgaagcgcgaactgacgagctttgtggtgctggttccccagggaacccccgacgttcagttgcgcctgacgaggccgcagctcaccaaggtccttaacgcgaccggggccgatagtgccacgcccaccacgttcgagctcggggttaacggcaaattttccgtgttcaccacgagtacctgcgtcacctttgctgcccgcgaggagggcgtgtcgtccagcaccagcacccaggtccagatcctgtccaacgcgctcaccaaggcgggccaggccgccgcgaacgccaagacggtgtacggggaaaatacccatcgcaccttctctgtggtcgtcgacgattgcagcatgcgggcggtgctccggcgactgcaggtcggcgggggcaccctcaagttcttcctcacgacccccgtccccagtctgtgcgtcaccgccaccggtcccaacgcggtatcggcggtatttctcctgaaaccccagaagatttgcctggactggctgggtcatagccaggggtctccttcagccgggagctcggcctcccgggcctctgggagcgagccaacagacagccaggactccgcgtcggacgcggtcagccacggcgatccggaagacctcgatggcgctgcccgggcgggagaggcgggggccttgcatgcctgtccgatgccgtcgtcgaccacgcgggtcactcccacgaccaagcgggggcgctcggggggcgaggatgcgcgcgcggacacggccctaaagaaacctaagacggggtcgcccaccgcacccccgcccgcagatccagtccccctggacacggaggacgactccgatgcggcggacgggacggcggcccgtcccgccgctccagacgcccggagcggaagccgttacgcgtgttactttcgcgacctcccgaccggagaagcaagccccggcgccttctccgccttccgggggggcccccaaaccccgtatggttttggattcccc

SEQ ID NO: 32 - protein, 487 aa, synthetic construct
TDSPGGVAPASPVEDASDASLGQPEEGAPCQVVLQGAELNGILQAFAPLRTSLLDSLLVMGDRGILIHNTIFGEQVFLPLEHSQFSRYRWRGPTAAFLSLVDQKRSLLSVFRANQYPDLRRVELAITGQAPFRTLVQRIWTTTSDGEAVELASETLMKRELTSFVVLVPQGTPDVQLRLTRPQLTKVLNATGADSATPTTFELGVNGKFSVFTTSTCVTFAAREEGVSSSTSTQVQILSNALTKAGQAAANAKTVYGENTHRTFSVVVDDCSMRAVLRRLQVGGGTLKFFLTTPVPSLCVTATGPNAVSAVFLLKPQKICLDWLGHSQGSPSAGSSASRASGSEPTDSQDSASDAVSHGDPEDLDGAARAGEAGALHACPMPSSTTRVTPTTKRGRSGGEDARADTALKKPKTGSPTAPPPADPVPLDTEDDSDAADGTAARPAAPDARSGSRYACYFRDLPTGEASPGAFSAFRGGPQTPYGFGFP

SEQ ID NO: 33 - DNA, 57 bp, synthetic construct
  source 1..57: mol_type = other DNA
gcaacaaacttctctctgctgaaacaagccggagatgtcgaagagaatcctggaccg

SEQ ID NO: 34 - protein, 19 aa, synthetic construct
ATNFSLLKQAGDVEENPGP

SEQ ID NO: 35 - DNA, 212 bp, synthetic construct
  source 1..212: mol_type = other DNA
gggcagagcgcacatcgcccacagtccccgagaagttggggggaggggtcggcaattgaaccggtgcctagagaaggtggcgcggggtaaactgggaaagtgatgtcgtgtactggctccgcctttttcccgagggtgggggagaaccgtatataagtgcagtagtcgccgtgaacgttctttttcgcaacgggtttgccgccagaacacag

SEQ ID NO: 36 - DNA, 56 bp, synthetic construct
  source 1..56: mol_type = other DNA
aataaaggaaatttattttcattgcaatagtgtgttggaattttttgtgtctctca

SEQ ID NO: 37 - DNA, 3588 bp, synthetic construct
  source 1..3588: mol_type = other DNA
atggagacaaagcccaagacggcaaccaccatcaaggtcccccccgggcccctgggatacgtgtacgctcgcgcgtgtccgtccgaaggcatcgagcttctggcgttactgtcggcacgcagcggcgattccgacgtcgccgtggcgcccctggtcgtgggcctgaccgtggagagcggctttgaggccaacgtggccgtggtcgtgggttctcgcacgacggggctcgggggtaccgcggtgtccctgaaactgacgccctcgcactacagctcgtccgtgtacgtctttcacggcggccggcacctggaccccagcacccaggccccgaacctgacgcgactttgcgagcgggcacgccgccattttggcttttcggactacaccccccggcccggcgacctcaaacacgagacgacgggggaggcgctgtgtgagcgcctcggcctggacccggaccgcgccctcctgtatctggtcgttaccgagggcttcaaggaggccgtgtgcatcaacaacacctttctgcacctgggaggctcggacaaggtaaccataggcggggcggaggtgcaccgcatacccgtgtacccgttgcagctgttcatgccggattttagccgtgtcatcgcagagccgttcaacgccaaccaccgatcgatcggggagaattttacctacccgcttccgttttttaaccgccccctcaaccgcctcctgttcgaggcggtcgtgggacccgccgccgtggcactgcgatgccgaaacgtggacgccgtggcccgcgccgccgcccacctggcgtttgacgaaaaccacgagggcgccgccctccccgccgacattacgttcacggccttcgaagccagccagggtaagaccccgcggggcgggcgcgacggcggcggcaagggcccggcgggcgggttcgaacagcgcctggcctccgtcatggccggagacgccgccctggccctcgagtctatcgtgtcgatggccgtctttgacgagccgcccaccgacatctccgcgtggccgctgttcgagggccaggacacggccgcggcccgcgccaacgccgtcggggcgtacctggcgcgcgccgcgggactcgtgggggccatggtatttagcaccaactcggccctccatctcaccgaggtggacgacgccggcccggcggacccaaaggaccacagcaaaccctccttttaccgcttcttcctcgtgcccgggacccacgtggcggccaacccacaggtggaccgcgagggacacgtggtgcccgggttcgagggtcggcccaccgcgcccctcgtcggcggaacccaggaatttgccggcgagcacctggccatgctgtgtgggttttccccggcgctgctggccaagatgctgttttacctggagcgctgcgacggcggcgtgatcgtcgggcgccaggagatggacgtgtttcgatacgtcgcggactccaaccagaccgacgtgccctgtaacctatgcaccttcgacacgcgccacgcctgcgtacacacgacgctcatgcgcctccgggcgcgccatccaaagttcgccagcgccgcccgcggagccatcggcgtcttcgggaccatgaacagcatgtatagcgactgcgacgtgctgggaaactacgccgccttctcggccctgaagcgcgcggacggatccgagaccgcccggaccatcatgcaggagacgtaccgcgcggcgaccgagcgcgtcatggccgaactcgagaccctgcagtacgtggaccaggcggtccccacggccatggggcggctggagaccatcatcaccaaccgcgaggccctgcatacggtggtgaacaacgtcaggcaggtcgtggaccgcgaggtggagcagctgatgcgcaacctggtggaggggaggaacttcaagtttcgcgacggtctgggcgaggccaaccacgccatgtccctgacgctggacccgtacgcgtgcgggccgtgccccctgcttcagcttctcgggcggcgatccaacctcgccgtgtaccaggacctggccctgagtcagtgccacggggtgttcgccgggcagtcggtcgaggggcgcaactttcgcaatcaattccaaccggtgctgcggcggcgcgtgatggacatgtttaacaacgggtttctgtcggccaaaacgctgacggtcgcgctctcggagggggcggctatctgcgcccccagcctaacggcgggccagacggcccccgccgagagcagcttcgagggcgacgttgcccgcgtgaccctggggtttcccaaggagctgcgcgtcaagagccgcgtgttgttcgcgggcgcgagcgccaacgcgtccgaggccgccaaggcgcgggtcgccagcctccagagcgcctaccagaagcccgacaagcgcgtggacatcctcctcggaccgctgggctttctgctcaagcagttccacgcggccatcttccccaacggcaagcccccggggtccaaccagccgaacccgcagtggttctggacggccctccaacgcaaccagcttcccgcccggctcctgtcgcgcgaggacatcgagaccatcgcgttcattaaaaagttttccctggactacggcgcgataaactttattaacctggcccccaacaacgtgagcgagctggcgatgtactacatggcaaaccagattctgcggtactgcgatcactcgacatacttcatcaacacccttacggccatcatcgcggggtcccgccgtccccccagcgtgcaggctgccgccgcgtggtccgcgcagggcggggcgggcctggaggccggggcccgcgcgctgatggacgccgtggacgcgcatccgggcgcgtggacgtccatgttcgccagctgcaacctgctgcggcccgtcatggcggcgcgccccatggtcgtgttggggttgagcatcagcaagtactacggcatggccggcaacgaccgtgtgtttcaggccgggaactgggccagcctgatgggcggcaaaaacgcgtgcccgctccttatttttgaccgcacccgcaagttcgtcctggcctgtccccgggccgggtttgtgtgcgcggcctcaagcctcggcggcggagcgcacgaaagctcgctgtgcgagcagctccggggcattatctccgagggcggggcggccgtcgccagtagcgtgttcgtggcgaccgtgaaaagcctggggccccgcacccagcagctgcagatcgaggactggctggcgctcctggaggacgagtacctaagcgaggagatgatggagctgaccgcgcgtgccctggagcgcggcaacggcgagtggtcgacggacgcggccctggaggtggcgcacgaggccgaggccctagtcagccaactcggcaacgccggggaggtgtttaactttggggattttggctgcgaggacgacaacgcgacgccgttcggcggcccgggggccccgggaccggcatttgccggccgcaaacgggcgttccacggggatgacccgtttggggaggggccccccgacaaaaagggagacctgacgttggatatgctg

SEQ ID NO: 38 - protein, 1196 aa, synthetic construct
METKPKTATTIKVPPGPLGYVYARACPSEGIELLALLSARSGDSDVAVAPLVVGLTVESGFEANVAVVVGSRTTGLGGTAVSLKLTPSHYSSSVYVFHGGRHLDPSTQAPNLTRLCERARRHFGFSDYTPRPGDLKHETTGEALCERLGLDPDRALLYLVVTEGFKEAVCINNTFLHLGGSDKVTIGGAEVHRIPVYPLQLFMPDFSRVIAEPFNANHRSIGENFTYPLPFFNRPLNRLLFEAVVGPAAVALRCRNVDAVARAAAHLAFDENHEGAALPADITFTAFEASQGKTPRGGRDGGGKGPAGGFEQRLASVMAGDAALALESIVSMAVFDEPPTDISAWPLFEGQDTAAARANAVGAYLARAAGLVGAMVFSTNSALHLTEVDDAGPADPKDHSKPSFYRFFLVPGTHVAANPQVDREGHVVPGFEGRPTAPLVGGTQEFAGEHLAMLCGFSPALLAKMLFYLERCDGGVIVGRQEMDVFRYVADSNQTDVPCNLCTFDTRHACVHTTLMRLRARHPKFASAARGAIGVFGTMNSMYSDCDVLGNYAAFSALKRADGSETARTIMQETYRAATERVMAELETLQYVDQAVPTAMGRLETIITNREALHTVVNNVRQVVDREVEQLMRNLVEGRNFKFRDGLGEANHAMSLTLDPYACGPCPLLQLLGRRSNLAVYQDLALSQCHGVFAGQSVEGRNFRNQFQPVLRRRVMDMFNNGFLSAKTLTVALSEGAAICAPSLTAGQTAPAESSFEGDVARVTLGFPKELRVKSRVLFAGASANASEAAKARVASLQSAYQKPDKRVDILLGPLGFLLKQFHAAIFPNGKPPGSNQPNPQWFWTALQRNQLPARLLSREDIETIAFIKKFSLDYGAINFINLAPNNVSELAMYYMANQILRYCDHSTYFINTLTAIIAGSRRPPSVQAAAAWSAQGGAGLEAGARALMDAVDAHPGAWTSMFASCNLLRPVMAARPMVVLGLSISKYYGMAGNDRVFQAGNWASLMGGKNACPLLIFDRTRKFVLACPRAGFVCAASSLGGGAHESSLCEQLRGIISEGGAAVASSVFVATVKSLGPRTQQLQIEDWLALLEDEYLSEEMMELTARALERGNGEWSTDAALEVAHEAEALVSQLGNAGEVFNFGDFGCEDDNATPFGGPGAPGPAFAGRKRAFHGDDPFGEGPPDKKGDLTLDML

SEQ ID NO: 39 - DNA, 753 bp, synthetic construct
  source 1..753: mol_type = other DNA
aaatgagtcttcggacctcgcgggggccgcttaagcggtggttagggtttgtctgacgcggggggagggggaaggaacgaaacactctcattcggaggcggctcggggtttggtcttggtggccacgggcacgcagaagagcgccgcgatcctcttaagcacccccccgccctccgtggaggcgggggtttggtcggcgggtggtaactggcgggccgctgactcgggcgggtcgcgcgccccagagtgtgaccttttcggtctgctcgcagacccccgggcggcgccgccgcggcggcgacgggctcgctgggtcctaggctccatggggaccgtatacgtggacaggctctggagcatccgcacgactgcggtgatattaccggagaccttctgcgggacgagccgggtcacgcggctgacgcggagcgtccgttgggcgacaaacaccaggacggggcacaggtacactatcttgtcacccggaggcgcgagggactgcaggagcttcagggagtggcgcagctgcttcatccccgtggcccgttgctcgcgtttgctggcggtgtccccggaagaaatatatttgcatgtctttagttctatgatgacacaaaccccgcccagcgtcttgtcattggcgaattcgaacacgcagatgcagtcggggcggcgcggtcccaggtccacttcgcatattaaggtgacgcgtgtggcctcgaacaccgagcgaccctgcagcgacccgcttaa

SEQ ID NO: 40 - DNA, 48 bp, synthetic construct
  source 1..48: mol_type = other DNA
cggcaataaaaagacagaataaaacgcacggtgttgggtcgtttgttc

SEQ ID NO: 41 - DNA, 12130 bp, synthetic construct
  source 1..12130: mol_type = other DNA
tgcagctctggcccgtgtctcaaaatctctgatgttacattgcacaagataaaaatatatcatcatgaacaataaaactgtctgcttacataaacagtaatacaaggggtgttatgagccatattcaacgggaaacgtcgaggccgcgattaaattccaacatggatgctgatttatatgggtataaatgggctcgcgataatgtcgggcaatcaggtgcgacaatctatcgcttgtatgggaagcccgatgcgccagagttgtttctgaaacatggcaaaggtagcgttgccaatgatgttacagatgagatggtcagactaaactggctgacggaatttatgcctcttccgaccatcaagcattttatccgtactcctgatgatgcatggttactcaccactgcgatccccggaaaaacagcattccaggtattagaagaatatcctgattcaggtgaaaatattgttgatgcgctggcagtgttcctgcgccggttgcattcgattcctgtttgtaattgtccttttaacagcgatcgcgtatttcgtctcgctcaggcgcaatcacgaatgaataacggtttggttgatgcgagtgattttgatgacgagcgtaatggctggcctgttgaacaagtctggaaagaaatgcataaacttttgccattctcaccggattcagtcgtcactcatggtgatttctcacttgataaccttatttttgacgaggggaaattaataggttgtattgatgttggacgagtcggaatcgcagaccgataccaggatcttgccatcctatggaactgcctcggtgagttttctccttcattacagaaacggctttttcaaaaatatggtattgataatcctgatatgaataaattgcagtttcatttgatgctcgatgagtttttctaatcagaattggttaattggttgtaacattattcagattgggcttgatttaaaacttcatttttaatttaaaaggatctaggtgaagatcctttttgataatctcatgaccaaaatcccttaacgtgagttttcgttccactgagcgtcagaccccgtagaaaagatcaaaggatcttcttgagatcctttttttctgcgcgtaatctgctgcttgcaaacaaaaaaaccaccgctaccagcggtggtttgtttgccggatcaagagctaccaactctttttccgaaggtaactggcttcagcagagcgcagataccaaatactgttcttctagtgtagccgtagttaggccaccacttcaagaactctgtagcaccgcctacatacctcgctctgctaatcctgttaccagtggctgctgccagtggcgataagtcgtgtcttaccgggttggactcaagacgatagttaccggataaggcgcagcggtcgggctgaacggggggttcgtgcacacagcccagcttggagcgaacgacctacaccgaactgagatacctacagcgtgagctatgagaaagcgccacgcttcccgaagggagaaaggcggacaggtatccggtaagcggcagggtcggaacaggagagcgcacgagggagcttccagggggaaacgcctggtatctttatagtcctgtcgggtttcgccacctctgacttgagcgtcgatttttgtgatgctcgtcaggggggcggagcctatggaaaaacgccagcaacgcggcctttttacggttcctggccttttgctggccttttgctcacatgttctttcctgcgttatcccctgattctgtggataaccgtattaccgcctttgagtgagctgataccgctcgccgcagccgaacgaccgagcgcagcgagtcagtgagcgaggaagcggaagagcgcccaatacgcaaaccgcctctccccgcgcgttggccgattcattaatgcagctggcacgacaggtttcccgactggaaagcgggcagtgagcgcaacgcaattaatgtgagttagctcactcattaggcaccccaggctttacactttatgcttccggctcgtatgttgtgtggaattgtgagcggataacaatttcacacaggaaacagctatgaccatgattacaccaagcttgcatgcaggcctctgcagtcgaccagaagcaccatgtccttgggtccggcctgctgaatgcgcaggcggtcggccatgccccaggcttcgttttgacatcggcgcaggtctttgtagtagtcttgcatgagcctttctaccggcacttcttcttctccttcctcttgtcctgcatctcttgcatctatcgctgcggcggcggcggagtttggccgtaggtggcgccctcttcctcccatgcgtgtgaccccgaagcccctcatcggctgaagcagggctaggtcggcgacaacgcgctcggctaatatggcctgctgcacctgcgtgagggtagactggaagtcatccatgtccacaaagcggtggtatgcgcccgtgttgatggtgtaagtgcagttggccataacggaccagttaacggtctggtgacccggctgcgagagctcggtgtacctgagacgcgagtaagccctcgagtcaaatacgtagtcgttgcaagtccgcaccaggtactggtatcccaccaaaaagtgcggcggcggctggcggtagaggggccagcgtagggtggccggggctccgggggcgagatcttccaacataaggcgatgatatccgtagatgtacctggacatccaggtgatgccggcggcggtggtggaggcgcgcggaaagtcgcggacgcggttccagatgttgcgcagcggcaaaaagtgctccatggtcgggacgctctggccggtcaggcgcgcgcaatcgttgacgctctagcgtgcaaaaggagagcctgtaagcgggcactcttccgtggtctggtggataaattcgcaagggtatcatggcggacgaccggggttcgagccccgtatccggccgtccgccgtgatccatgcggttaccgcccgcgtgtcgaacccaggtgtgcgacgtcagacaacgggggagtgctccttttggcttccttccaggcgcggcggctgctgcgctagcttttttggccactggccgcgcgcagcgtaagcggttaggctggaaagcgaaagcattaagtggctcgctccctgtagccggagggttattttccaagggttgagtcgcgggacccccggttcgagtctcggaccgagactgggggcgtacactggatggcctttgcctggaacccgcactcaaaaacatgctacctctttgagccctttggcttttctgaccagcgactcaagcaggtttaccagtttgagtacgagtcactcctgcgccgtagcgccattgcttcttcccccgaccgctgtataacgctggaaaagtccacccaaagcgtacaggggcccaactcggccgcctgtggactattctgctgcatgtttctccacgcctttgccaactggccccaaactcccatggatcacaaccccaccatgaaccttattaccggggtacccaactccatgctcaacagtccccaggtacagcccaccctgcgtcgcaaccaggaacagctctacagcttcctggagcgccactcgccctacttccgcagccacagtgcgcagattaggagcgccacttctttttgtcacttgaaaaacatgtaaaaataatgtactagagacactttcaataaaggcaaatgcttttatttgtacactctcgggtgattatttacccccacccttgccgtctgcgccgtttaaaaatcaaaggggttctgccgcgcatcgctatgcgccactggcagggacacgttgcgatactggtgtttagtgctccacttaaactcaggcacaaccatccgcggcagctcggtgaagttttcactccacaggctgcgcaccatcaccaacgcgtttagcaggtcgggcgccgatatcttgaagtcgcagttggggcctccgccctgcgcgcgcgagttgcgatacacagggttgcagcactggaacactatcagcgccgggtggtgcacgctggccagcacgctcttgtcggagatcagatccgcgtccaggtcctccgcgttgctcagggcgaacggagtcaactttggtagctgccttcccaaaaagggcgcgtgcccaggctttgagttgcactcgcaccgtagtggcatcaaaaggtgaccgtgcccggtctgggcgttaggatacagcgcctgcataaaagccttgatctgcttaaaagccacctgagcctttgcgccttcagagaagaacatgccgcaagacttgccggaaaactgattggccggacaggccgcgtcgtgcacgcagcaccttgcgtcggtgttggagatctgcaccacatttcggccccaccggttcttcacgatcttggccttgctagactgctccttcagcgcgcgctgcccgttttcgctcgtcacatccatttcaatcacgtgctccttatttatcataatgcttccgtgtagacacttaagctcgccttcgatctcagcgcagcggtgcagccacaacgcgcagcccgtgggctcgtgatgcttgtaggtcacctctgcaaacgactgcaggtacgcctgcaggaatcgccccatcatcgtcacaaaggtcttgttgctggtgaaggtcagctgcaacccgcggtgctcctcgttcagccaggtcttgcatacggccgccagagcttccacttggtcaggcagtagtttgaagttcgcctttagatcgttatccacgtggtacttgtccatcagcgcgcgcgcagcctccatgcccttctcccacgcagacacgatcggcacactcagcgggttcatcaccgtaatttcactttccgcttcgctgggctcttcctcttcctcttgcgtccgcataccacgcgccactgggtcgtcttcattcagccgccgcactgtgcgcttacctcctttgccatgcttgattagcaccggtgggttgctgaaacccaccatttgtagcgccacatcttctctttcttcctcgctgtccacgattacctctggtgatggcgggcgctcgggcttgggagaagggcgcttctttttcttcttgggcgcaatggccaaatccgccgccgaggtcgatggccgcgggctgggtgtgcgcggcaccagcgcgtcttgtgatgagtcttcctcgtcctcggactcgatacgccgcctcatccgcttttttgggggcgcccggggaggcggcggcgacggggacggggacgacacgtcctccatggttgggggacgtcgcgccgcaccgcgtccgcgctcgggggtggtttcgcgctgctcctcttcccgactggccatttccttctcctataggcagaaaaagatcatggagtcagtcgagaagaaggacagcctaaccgccccctctgagttcgccaccaccgcctccaccgatgccgccaacgcgcctaccaccttccccgtcgaggcacccccgcttgaggaggaggaagtgattatcgagcaggacccaggttttgtaagcgaagacgacgaggaccgctcagtaccaacagaggataaaaagcaagaccaggacaacgcagaggcaaacgaggaacaagtcgggcggggggacgaaaggcatggcgactacctagatgtgggagacgacgtgctgttgaagcatctgcagcgccagtgcgccattatctgcgacgcgttgcaagagcgcagcgatgtgcccctcgccatagcggatgtcagccttgcctacgaacgccacctattctcaccgcgcgtaccccccaaacgccaagaaaacggcacatgcgagcccaacccgcgcctcaacttctaccccgtatttgccgtgccagaggtgcttgccacctatcacatctttttccaaaactgcaagatacccctatcctgccgtgccaaccgcagccgagcggacaagcagctggccttgcggcagggcgctgtcatacctgatatcgcctcgctcaacgaagtgccaaaaatctttgagggtcttggacgcgacgagaagcgcgcggcaaacgctctgcaacaggaaaacagcgaaaatgaaagtcactctggagtgttggtggaactcgagggtgacaacgcgcgcctagccgtactaaaacgcagcatcgaggtcacccactttgcctacccggcacttaacctaccccccaaggtcatgagcacagtcatgagtgagctgatcgtgcgccgtgcgcagcccctggagagggatgcaaatttgcaagaacaaacagaggagggcctacccgcagttggcgacgagcagctagcgcgctggcttcaaacgcgcgagcctgccgacttggaggagcgacgcaaactaatgatggccgcagtgctcgttaccgtggagcttgagtgcatgcagcggttctttgctgacccggagatgcagcgcaagctagaggaaacattgcactacacctttcgacagggctacgtacgccaggcctgcaagatctccaacgtggagctctgcaacctggtctcctaccttggaattttgcacgaaaaccgccttgggcaaaacgtgcttcattccacgctcaagggcgaggcgcgccgcgactacgtccgcgactgcgtttacttatttctatgctacacctggcagacggccatgggcgtttggcagcagtgcttggaggagtgcaacctcaaggagctgcagaaactgctaaagcaaaacttgaaggacctatggacggccttcaacgagcgctccgtggccgcgcacctggcggacatcattttccccgaacgcctgcttaaaaccctgcaacagggtctgccagacttcaccagtcaaagcatgttgcagaactttaggaactttatcctagagcgctcaggaatcttgcccgccacctgctgtgcacttcctagcgactttgtgcccattaagtaccgcgaatgccctccgccgctttggggccactgctaccttctgcagctagccaactaccttgcctaccactctgacataatggaagacgtgagcggtgacggtctactggagtgtcactgtcgctgcaacctatgcaccccgcaccgctccctggtttgcaattcgcagctgcttaacgaaagtcaaattatcggtacctttgagctgcagggtccctcgcctgacgaaaagtccgcggctccggggttgaaactcactccggggctgtggacgtcggcttaccttcgcaaatttgtacctgaggactaccacgcccacgagattaggttctacgaagaccaatcccgcccgcctaatgcggagcttaccgcctgcgtcattacccagggccacattcttggccaattgcaagccatcaacaaagcccgccaagagtttctgctacgaaagggacggggggtttacttggacccccagtccggcgaggagctcaacccaatccccccgccgccgcagccctatcagcagcagccgcgggcccttgcttcccaggatggcacccaaaaagaagctgcagctgccgccgccacccacggacgaggaggaatactgggacagtcaggcagaggaggttttggacgaggaggaggaggacatgatggaagactgggagagcctagacgaggaagcttccgaggtcgaagaggtgtcagacgaaacaccgtcaccctcggtcgcattcccctcgccggcgccccagaaatcggcaaccggttccagcatggctacaacctccgctcctcaggcgccgccggcactgcccgttcgccgacccaaccgtagatgggacaccactggaaccagggccggtaagtccaagcagccgccgccgttagcccaagagcaacaacagcgccaaggctaccgctcatggcgcgggcacaagaacgccatagttgcttgcttgcaagactgtgggggcaacatctccttcgcccgccgctttcttctctaccatcacggcgtggccttcccccgtaacatcctgcattactaccgtcatctctacagcccatactgcaccggcggcagcggcagcaacagcagcggccacacagaagcaaaggcgaccggatagcaagactctgacaaagcccaagaaatccacagcggcggcagcagcaggaggaggagcgctgcgtctggcgcccaacgaacccgtatcgacccgcgagcttagaaacaggatttttcccactctgtatgctatatttcaacagagcaggggccaagaacaagagctgaaaataaaaaacaggtctctgcgatccctcacccgcagctgcctgtatcacaaaagcgaagatcagcttcggcgcacgctggaagacgcggaggctctcttcagtaaatactgcgcgctgactcttaaggactagtttcgcgccctttctcaaatttaagcgcgaaaactacgtcatctccagcggccacacccggcgccagcacctgttgtcagcgccattatgagcaaggaaattcccacgccctacatgtggagttaccagccacaaatgggacttgcggctggagctgcccaagactactcaacccgaataaactacatgagcgcggggcggccgccgtttgtgttatgtttcaacgtgtttatttttcaattgcagaaaatttcaagtcatttttcattcagtagtatagccccaccaccacatagcttatacagatcaccgtaccttaatcaaactcacagaaccctagtattcaacctgccacctccctcccaacacacagagtacacagtcctttctccccggctggccttaaaaagcatcatatcatgggtaacagacatattcttaggtgttatattccacacggtttcctgtcgagccaaacgctcatcagtgatattaataaactccccgggcagctcacttaagttcatgtcgctgtccagctgctgagccacaggctgctgtccaacttgcggttgcttaacgggcggcgaaggagaagtccacgcctacatgggggtagagtcataatcgtgcatcaggatagggcggtggtgctgcagcagcgcgcgaataaactgctgccgccgccgctccgtcctgcaggaatacaacatggcagtggtctcctcagcgatgattcgcaccgcccgcagcataaggcgccttgtcctccgggcacagcagcgcaccctgatctcacttaaatcagcacagtaactgcagcacagcaccacaatattgttcaaaatcccacagtgcaaggcgctgtatccaaagctcatggcggggaccacagaacccacgtggccatcataccacaagcgcaggtagattaagtggcgacccctcataaacacgctggacataaacattacctcttttggcatgttgtaattcaccacctcccggtaccatataaacctctgattaaacatggcgccatccaccaccatcctaaaccagctggccaaaacctgcccgccggctatacactgcagggaaccgggactggaacaatgacagtggagagcccaggactcgtaaccatggatcatcatgctcgtcatgatatcaatgttggcacaacacaggcacacgtgcatacacttcctcaggattacaagctcctcccgcgttagaaccatatcccagggaacaacccattcctgaatcagcgtaaatcccacactgcagggaagacctcgcacgtaactcacgttgtgcattgtcaaagtgttacattcgggcagcagcggatgatcctccagtatggtagcgcgggtttctgtctcaaaaggaggtagacgatccctactgtacggagtgcgccgagacaaccgagatcgtgttggtcgtagtgtcatgccaaatggaacgccggacgtagtcatatttcctgaagcaaaaccaggtgcgggcgtgacaaacagatctgcgtctccggtctcgccgcttagatcgctctgtgtagtagttgtagtatatccactctctcaaagcatccaggcgccccctggcttcgggttctatgtaaactccttcatgcgccgctgccctgataacatccaccaccgcagaataagccacacccagccaacctacacattcgttctgcgagtcacacacgggaggagcgggaagagctggaagaaccatgtttttttttttattccaaaagattatccaaaacctcaaaatgaagatctattaagtgaacgcgctcccctccggtggcgtggtcaaactctacagccaaagaacagataatggcatttgtaagatgttgcacaatggcttccaaaaggcaaacggccctcacgtccaagtggacgtaaaggctaaacccttcagggtgaatctcctctataaacattccagcaccttcaaccatgcccaaataattctcatctcgccaccttctcaatatatctctaagcaaatcccgaatattaagtccggccattgtaaaaatctgctccagagcgccctccaccttcagcctcaagcagcgaatcatgattgcaaaaattcaggttcctcacagacctgtataagattcaaaagcggaacattaacaaaaataccgcgatcccgtaggtcccttcgcagggccagctgaacataatcgtgcaggtctgcacggaccagcgcggccacttccccgccaggaaccatgacaaaagaacccacactgattatgacacgcatactcggagctatgctaaccagcgtagccccgatgtaagcttgttgcatgggcggcgatataaaatgcaaggtgctgctcaaaaaatcaggcaaagcctcgcgcaaaaaagaaagcacatcgtagtcatgctcatgcagataaaggcaggtaagctccggaaccaccacagaaaaagacaccatttttctctcaaacatgtctgcgggtttctgcataaacacaaaataaaataacaaaaaaacatttaaacattagaagcctgtcttacaacaggaaaaacaacccttataagcataagacggactacggccatgccggcgtgaccgtaaaaaaactggtcaccgtgattaaaaagcaccaccgacagctcctcggtcatgtccggagtcataatgtaagactcggtaaacacatcaggttgattcacatcggtcagtgctaaaaagcgaccgaaatagcccgggggaatacatacccgcaggcgtagagacaacattacagcccccataggaggtataacaaaattaataggagagaaaaacacataaacacctgaaaaaccctcctgcctaggcaaaatagcaccctcccgctccagaacaacatacagcgcttccacagcggcagccataacagtcagccttaccagtaaaaaagaaaacctattaaaaaaacaccactcgacacggcaccagctcaatcagtcacagtgtaaaaaagggccaagtgcagagcgagtatatataggactaaaaaatgacgtaacggttaaagtccacaaaaaacacccagaaaaccgcacgcgaacctacgcccagaaacgaaagccaaaaaacccacaacttcctcaaatcgtcacttccgttttcccacgttacgtcacttcccattttaagaaaactacaattcccaacacatacaagttactccgcccttaattaaatcggatccgatatctagatgtattcgcgaggtaccgagctcgaattctctggccgtcgttttacaacgtcgtgactgggaaaaccctggcgttacccaacttaatcgccttgcagcacatccccctttcgccagctggcgtaatagcgaagaggcccgcaccgatcgcccttcccaacagttgcgcagcctgaatggcgaatggcgcctgatgcggtattttctccttacgcatctgtgcggtatttcacaccgcatatggtgcactctcagtacaatctgctctgatgccgcatagttaagccagccccgacacccgccaacacccgctgacgcgccctgacgggcttgtctgctcccggcatccgcttacagacaagctgtgaccgtctccgggagctgcatgtgtcagaggttttcaccgtcatcaccgaaacgcgcga

SEQ ID NO: 42 - DNA, 9135 bp, synthetic construct
  source 1..9135: mol_type = other DNA
tgcagctctggcccgtgtctcaaaatctctgatgttacattgcacaagataaaaatatatcatcatgaacaataaaactgtctgcttacataaacagtaatacaaggggtgttatgagccatattcaacgggaaacgtcgaggccgcgattaaattccaacatggatgctgatttatatgggtataaatgggctcgcgataatgtcgggcaatcaggtgcgacaatctatcgcttgtatgggaagcccgatgcgccagagttgtttctgaaacatggcaaaggtagcgttgccaatgatgttacagatgagatggtcagactaaactggctgacggaatttatgcctcttccgaccatcaagcattttatccgtactcctgatgatgcatggttactcaccactgcgatccccggaaaaacagcattccaggtattagaagaatatcctgattcaggtgaaaatattgttgatgcgctggcagtgttcctgcgccggttgcattcgattcctgtttgtaattgtccttttaacagcgatcgcgtatttcgtctcgctcaggcgcaatcacgaatgaataacggtttggttgatgcgagtgattttgatgacgagcgtaatggctggcctgttgaacaagtctggaaagaaatgcataaacttttgccattctcaccggattcagtcgtcactcatggtgatttctcacttgataaccttatttttgacgaggggaaattaataggttgtattgatgttggacgagtcggaatcgcagaccgataccaggatcttgccatcctatggaactgcctcggtgagttttctccttcattacagaaacggctttttcaaaaatatggtattgataatcctgatatgaataaattgcagtttcatttgatgctcgatgagtttttctaatcagaattggttaattggttgtaacattattcagattgggcttgatttaaaacttcatttttaatttaaaaggatctaggtgaagatcctttttgataatctcatgaccaaaatcccttaacgtgagttttcgttccactgagcgtcagaccccgtagaaaagatcaaaggatcttcttgagatcctttttttctgcgcgtaatctgctgcttgcaaacaaaaaaaccaccgctaccagcggtggtttgtttgccggatcaagagctaccaactctttttccgaaggtaactggcttcagcagagcgcagataccaaatactgttcttctagtgtagccgtagttaggccaccacttcaagaactctgtagcaccgcctacatacctcgctctgctaatcctgttaccagtggctgctgccagtggcgataagtcgtgtcttaccgggttggactcaagacgatagttaccggataaggcgcagcggtcgggctgaacggggggttcgtgcacacagcccagcttggagcgaacgacctacaccgaactgagatacctacagcgtgagctatgagaaagcgccacgcttcccgaagggagaaaggcggacaggtatccggtaagcggcagggtcggaacaggagagcgcacgagggagcttccagggggaaacgcctggtatctttatagtcctgtcgggtttcgccacctctgacttgagcgtcgatttttgtgatgctcgtcaggggggcggagcctatggaaaaacgccagcaacgcggcctttttacggttcctggccttttgctggccttttgctcacatgttctttcctgcgttatcccctgattctgtggataaccgtattaccgcctttgagtgagctgataccgctcgccgcagccgaacgaccgagcgcagcgagtcagtgagcgaggaagcggaagagcgcccaatacgcaaaccgcctctccccgcgcgttggccgattcattaatgcagctggcacgacaggtttcccgactggaaagcgggcagtgagcgcaacgcaattaatgtgagttagctcactcattaggcaccccaggctttacactttatgcttccggctcgtatgttgtgtggaattgtgagcggataacaatttcacacaggaaacagctatgaccatgattacaccaagcttgcatgcaggcctctgcagtcgaccagaagcaccatgtccttgggtccggcctgctgaatgcgcaggcggtcggccatgccccaggcttcgttttgacatcggcgcaggtctttgtagtagtcttgcatgagcctttctaccggcacttcttcttctccttcctcttgtcctgcatctcttgcatctatcgctgcggcggcggcggagtttggccgtaggtggcgccctcttcctcccatgcgtgtgaccccgaagcccctcatcggctgaagcagggctaggtcggcgacaacgcgctcggctaatatggcctgctgcacctgcgtgagggtagactggaagtcatccatgtccacaaagcggtggtatgcgcccgtgttgatggtgtaagtgcagttggccataacggaccagttaacggtctggtgacccggctgcgagagctcggtgtacctgagacgcgagtaagccctcgagtcaaatacgtagtcgttgcaagtccgcaccaggtactggtatcccaccaaaaagtgcggcggcggctggcggtagaggggccagcgtagggtggccggggctccgggggcgagatcttccaacataaggcgatgatatccgtagatgtacctggacatccaggtgatgccggcggcggtggtggaggcgcgcggaaagtcgcggacgcggttccagatgttgcgcagcggcaaaaagtgctccatggtcgggacgctctggccggtcaggcgcgcgcaatcgttgacgctctagcgtgcaaaaggagagcctgtaagcgggcactcttccgtggtctggtggataaattcgcaagggtatcatggcggacgaccggggttcgagccccgtatccggccgtccgccgtgatccatgcggttaccgcccgcgtgtcgaacccaggtgtgcgacgtcagacaacgggggagtgctccttttggcttccttccaggcgcggcggctgctgcgctagcttttttggccactggccgcgcgcagcgtaagcggttaggctggaaagcgaaagcattaagtggctcgctccctgtagccggagggttattttccaagggttgagtcgcgggacccccggttcgagtctcggaccgagactgggggcgtacactggatggcctttgcctggaacccgcactcaaaaacatgctacctctttgagccctttggcttttctgaccagcgactcaagcaggtttaccagtttgagtacgagtcactcctgcgccgtagcgccattgcttcttcccccgaccgctgtataacgctggaaaagtccacccaaagcgtacaggggcccaactcggccgcctgtggactattctgctgcatgtttctccacgcctttgccaactggccccaaactcccatggatcacaaccccaccatgaaccttattaccggggtacccaactccatgctcaacagtccccaggtacagcccaccctgcgtcgcaaccaggaacagctctacagcttcctggagcgccactcgccctacttccgcagccacagtgcgcagattaggagcgccacttctttttgtcacttgaaaaacatgtaaaaataatgtactagagacactttcaataaaggcaaatgcttttatttgtacactctcgggtgattatttacccccacccttgccgtctgcgccgtttaaaaatcaaaggggttctgccgcgcatcgctatgcgccactggcagggacacgttgcgatactggtgtttagtgctccacttaaactcaggcacaaccatccgcggcagctcggtgaagttttcactccacaggctgcgcaccatcaccaacgcgtttagcaggtcgggcgccgatatcttgaagtcgcagttggggcctccgccctgcgcgcgcgagttgcgatacacagggttgcagcactggaacactatcagcgccgggtggtgcacgctggccagcacgctcttgtcggagatcagatccgcgtccaggtcctccgcgttgctcagggcgaacggagtcaactttggtagctgccttcccaaaaagggcgcgtgcccaggctttgagttgcactcgcaccgtagtggcatcaaaaggtgaccgtgcccggtctgggcgttaggatacagcgcctgcataaaagccttgatctgcttaaaagccacctgagcctttgcgccttcagagaagaacatgccgcaagacttgccggaaaactgattggccggacaggccgcgtcgtgcacgcagcaccttgcgtcggtgttggagatctgcaccacatttcggccccaccggttcttcacgatcttggccttgctagactgctccttcagcgcgcgctgcccgttttcgctcgtcacatccatttcaatcacgtgctccttatttatcataatgcttccgtgtagacacttaagctcgccttcgatctcagcgcagcggtgcagccacaacgcgcagcccgtgggctcgtgatgcttgtaggtcacctctgcaaacgactgcaggtacgcctgcaggaatcgccccatcatcgtcacaaaggtcttgttgctggtgaaggtcagctgcaacccgcggtgctcctcgttcagccaggtcttgcatacggccgccagagcttccacttggtcaggcagtagtttgaagttcgcctttagatcgttatccacgtggtacttgtccatcagcgcgcgcgcagcctccatgcccttctcccacgcagacacgatcggcacactcagcgggttcatcaccgtaatttcactttccgcttcgctgggctcttcctcttcctcttgcgtccgcataccacgcgccactgggtcgtcttcattcagccgccgcactgtgcgcttacctcctttgccatgcttgattagcaccggtgggttgctgaaacccaccatttgtagcgccacatcttctctttcttcctcgctgtccacgattacctctggtgatggcgggcgctcgggcttgggagaagggcgcttctttttcttcttgggcgcaatggccaaatccgccgccgaggtcgatggccgcgggctgggtgtgcgcggcaccagcgcgtcttgtgatgagtcttcctcgtcctcggactcgatacgccgcctcatccgcttttttgggggcgcccggggaggcggcggcgacggggacggggacgacacgtcctccatggttgggggacgtcgcgccgcaccgcgtccgcgctcgggggtggtttcgcgctgctcctcttcccgactggccatttccttctcctataggcagaaaaagatccacaaaagcgaagatcagcttcggcgcacgctggaagacgcggaggctctcttcagtaaatactgcgcgctgactcttaaggactagtttcgcgccctttctcaaatttaagcgcgaaaactacgtcatctccagcggccacacccggcgccagcacctgttgtcagcgccattggcgcgccggccggccgaatatcttcatttaaatgtttaaacatcgatgcggccgccgtttgtgttatgtttcaacgtgtttatttttcaattgcagaaaatttcaagtcatttttcattcagtagtatagccccaccaccacatagcttatacagatcaccgtaccttaatcaaactcacagaaccctagtattcaacctgccacctccctcccaacacacagagtacacagtcctttctccccggctggccttaaaaagcatcatatcatgggtaacagacatattcttaggtgttatattccacacggtttcctgtcgagccaaacgctcatcagtgatattaataaactccccgggcagctcacttaagttcatgtcgctgtccagctgctgagccacaggctgctgtccaacttgcggttgcttaacgggcggcgaaggagaagtccacgcctacatgggggtagagtcataatcgtgcatcaggatagggcggtggtgctgcagcagcgcgcgaataaactgctgccgccgccgctccgtcctgcaggaatacaacatggcagtggtctcctcagcgatgattcgcaccgcccgcagcataaggcgccttgtcctccgggcacagcagcgcaccctgatctcacttaaatcagcacagtaactgcagcacagcaccacaatattgttcaaaatcccacagtgcaaggcgctgtatccaaagctcatggcggggaccacagaacccacgtggccatcataccacaagcgcaggtagattaagtggcgacccctcataaacacgctggacataaacattacctcttttggcatgttgtaattcaccacctcccggtaccatataaacctctgattaaacatggcgccatccaccaccatcctaaaccagctggccaaaacctgcccgccggctatacactgcagggaaccgggactggaacaatgacagtggagagcccaggactcgtaaccatggatcatcatgctcgtcatgatatcaatgttggcacaacacaggcacacgtgcatacacttcctcaggattacaagctcctcccgcgttagaaccatatcccagggaacaacccattcctgaatcagcgtaaatcccacactgcagggaagacctcgcacgtaactcacgttgtgcattgtcaaagtgttacattcgggcagcagcggatgatcctccagtatggtagcgcgggtttctgtctcaaaaggaggtagacgatccctactgtacggagtgcgccgagacaaccgagatcgtgttggtcgtagtgtcatgccaaatggaacgccggacgtagtcatatttcctgaagcaaaaccaggtgcgggcgtgacaaacagatctgcgtctccggtctcgccgcttagatcgctctgtgtagtagttgtagtatatccactctctcaaagcatccaggcgccccctggcttcgggttctatgtaaactccttcatgcgccgctgccctgataacatccaccaccgcagaataagccacacccagccaacctacacattcgttctgcgagtcacacacgggaggagcgggaagagctggaagaaccatgtttttttttttattccaaaagattatccaaaacctcaaaatgaagatctattaagtgaacgcgctcccctccggtggcgtggtcaaactctacagccaaagaacagataatggcatttgtaagatgttgcacaatggcttccaaaaggcaaacggccctcacgtccaagtggacgtaaaggctaaacccttcagggtgaatctcctctataaacattccagcaccttcaaccatgcccaaataattctcatctcgccaccttctcaatatatctctaagcaaatcccgaatattaagtccggccattgtaaaaatctgctccagagcgccctccaccttcagcctcaagcagcgaatcatgattgcaaaaattcaggttcctcacagacctgtataagattcaaaagcggaacattaacaaaaataccgcgatcccgtaggtcccttcgcagggccagctgaacataatcgtgcaggtctgcacggaccagcgcggccacttccccgccaggaaccatgacaaaagaacccacactgattatgacacgcatactcggagctatgctaaccagcgtagccccgatgtaagcttgttgcatgggcggcgatataaaatgcaaggtgctgctcaaaaaatcaggcaaagcctcgcgcaaaaaagaaagcacatcgtagtcatgctcatgcagataaaggcaggtaagctccggaaccaccacagaaaaagacaccatttttctctcaaacatgtctgcgggtttctgcataaacacaaaataaaataacaaaaaaacatttaaacattagaagcctgtcttacaacaggaaaaacaacccttataagcataagacggactacggccatgccggcgtgaccgtaaaaaaactggtcaccgtgattaaaaagcaccaccgacagctcctcggtcatgtccggagtcataatgtaagactcggtaaacacatcaggttgattcacatcggtcagtgctaaaaagcgaccgaaatagcccgggggaatacatacccgcaggcgtagagacaacattacagcccccataggaggtataacaaaattaataggagagaaaaacacataaacacctgaaaaaccctcctgcctaggcaaaatagcaccctcccgctccagaacaacatacagcgcttccacagcggcagccataacagtcagccttaccagtaaaaaagaaaacctattaaaaaaacaccactcgacacggcaccagctcaatcagtcacagtgtaaaaaagggccaagtgcagagcgagtatatataggactaaaaaatgacgtaacggttaaagtccacaaaaaacacccagaaaaccgcacgcgaacctacgcccagaaacgaaagccaaaaaacccacaacttcctcaaatcgtcacttccgttttcccacgttacgtcacttcccattttaagaaaactacaattcccaacacatacaagttactccgcccttaattaaatcggatccgatatctagatgtattcgcgaggtaccgagctcgaattctctggccgtcgttttacaacgtcgtgactgggaaaaccctggcgttacccaacttaatcgccttgcagcacatccccctttcgccagctggcgtaatagcgaagaggcccgcaccgatcgcccttcccaacagttgcgcagcctgaatggcgaatggcgcctgatgcggtattttctccttacgcatctgtgcggtatttcacaccgcatatggtgcactctcagtacaatctgctctgatgccgcatagttaagccagccccgacacccgccaacacccgctgacgcgccctgacgggcttgtctgctcccggcatccgcttacagacaagctgtgaccgtctccgggagctgcatgtgtcagaggttttcaccgtcatcaccgaaacgcgcga

SEQ ID NO: 43 - DNA, 8236 bp, synthetic construct
  source 1..8236: mol_type = other DNA
tgcagctctggcccgtgtctcaaaatctctgatgttacattgcacaagataaaaatatatcatcatgaacaataaaactgtctgcttacataaacagtaatacaaggggtgttatgagccatattcaacgggaaacgtcgaggccgcgattaaattccaacatggatgctgatttatatgggtataaatgggctcgcgataatgtcgggcaatcaggtgcgacaatctatcgcttgtatgggaagcccgatgcgccagagttgtttctgaaacatggcaaaggtagcgttgccaatgatgttacagatgagatggtcagactaaactggctgacggaatttatgcctcttccgaccatcaagcattttatccgtactcctgatgatgcatggttactcaccactgcgatccccggaaaaacagcattccaggtattagaagaatatcctgattcaggtgaaaatattgttgatgcgctggcagtgttcctgcgccggttgcattcgattcctgtttgtaattgtccttttaacagcgatcgcgtatttcgtctcgctcaggcgcaatcacgaatgaataacggtttggttgatgcgagtgattttgatgacgagcgtaatggctggcctgttgaacaagtctggaaagaaatgcataaacttttgccattctcaccggattcagtcgtcactcatggtgatttctcacttgataaccttatttttgacgaggggaaattaataggttgtattgatgttggacgagtcggaatcgcagaccgataccaggatcttgccatcctatggaactgcctcggtgagttttctccttcattacagaaacggctttttcaaaaatatggtattgataatcctgatatgaataaattgcagtttcatttgatgctcgatgagtttttctaatcagaattggttaattggttgtaacattattcagattgggcttgatttaaaacttcatttttaatttaaaaggatctaggtgaagatcctttttgataatctcatgaccaaaatcccttaacgtgagttttcgttccactgagcgtcagaccccgtagaaaagatcaaaggatcttcttgagatcctttttttctgcgcgtaatctgctgcttgcaaacaaaaaaaccaccgctaccagcggtggtttgtttgccggatcaagagctaccaactctttttccgaaggtaactggcttcagcagagcgcagataccaaatactgttcttctagtgtagccgtagttaggccaccacttcaagaactctgtagcaccgcctacatacctcgctctgctaatcctgttaccagtggctgctgccagtggcgataagtcgtgtcttaccgggttggactcaagacgatagttaccggataaggcgcagcggtcgggctgaacggggggttcgtgcacacagcccagcttggagcgaacgacctacaccgaactgagatacctacagcgtgagctatgagaaagcgccacgcttcccgaagggagaaaggcggacaggtatccggtaagcggcagggtcggaacaggagagcgcacgagggagcttccagggggaaacgcctggtatctttatagtcctgtcgggtttcgccacctctgacttgagcgtcgatttttgtgatgctcgtcaggggggcggagcctatggaaaaacgccagcaacgcggcctttttacggttcctggccttttgctggccttttgctcacatgttctttcctgcgttatcccctgattctgtggataaccgtattaccgcctttgagtgagctgataccgctcgccgcagccgaacgaccgagcgcagcgagtcagtgagcgaggaagcggaagagcgcccaatacgcaaaccgcctctccccgcgcgttggccgattcattaatgcagctggcacgacaggtttcccgactggaaagcgggcagtgagcgcaacgcaattaatgtgagttagctcactcattaggcaccccaggctttacactttatgcttccggctcgtatgttgtgtggaattgtgagcggataacaatttcacacaggaaacagctatgaccatgattacaccaagcttgcatgcaggcctatccgtagatgtacctggacatccaggtgatgccggcggcggtggtggaggcgcgcggaaagtcgcggacgcggttccagatgttgcgcagcggcaaaaagtgctccatggtcgggacgctctggccggtgaggcgtgcgcagtcgttgacgctctagaccgtgcaaaaggagagcctgtaagcgggcactcttccgtggtctggtggataaattcgcaagggtatcatggcggacgaccggggttcgaaccccggatccggccgtccgccgtgatccatgcggttaccgcccgcgtgtcgaacccaggtgtgcgacgtcagacaacgggggagcgctccttttggcttccttccaggcgcggcggctgctgcgctagcttttttggccactggccgcgcgcggcgtaagcggttaggctggaaagcgaaagcattaagtggctcgctccctgtagccggagggttattttccaagggttgagtcgcaggacccccggttcgagtctcgggccggccggactgcggcgaacgggggtttgcctccccgtcatgcaagaccccgcttgcaaattcctccggaaacagggacgagccccttttttgcttttcccagatgcatccggtgctgcggcagatgcgcccccctcctcagcagcggcaagagcaagagcagcggcagacatgcagggcaccctccccttctcctaccgcgtcaggaggggcaacatctgtacactctcgggtgattatttacccccacccttgccgtctgcgccgtttaaaaatcaaaggggttctgccgcgcatcgctatgcgccactggcagggacacgttgcgatactggtgtttagtgctccacttaaactcaggcacaaccatccgcggcagctcggtgaagttttcactccacaggctgcgcaccatcaccaacgcgtttagcaggtcgggcgccgatatcttgaagtcgcagttggggcctccgccctgcgcgcgcgagttgcgatacacagggttgcagcactggaacactatcagcgccgggtggtgcacgctggccagcacgctcttgtcggagatcagatccgcgtccaggtcctccgcgttgctcagggcgaacggagtcaactttggtagctgccttcccaaaaagggcgcgtgcccaggctttgagttgcactcgcaccgtagtggcatcaaaaggtgaccgtgcccggtctgggcgttaggatacagcgcctgcataaaagccttgatctgcttaaaagccacctgagcctttgcgccttcagagaagaacatgccgcaagacttgccggaaaactgattggccggacaggccgcgtcgtgcacgcagcaccttgcgtcggtgttggagatctgcaccacatttcggccccaccggttcttcacgatcttggccttgctagactgctccttcagcgcgcgctgcccgttttcgctcgtcacatccatttcaatcacgtgctccttatttatcataatgcttccgtgtagacacttaagctcgccttcgatctcagcgcagcggtgcagccacaacgcgcagcccgtgggctcgtgatgcttgtaggtcacctctgcaaacgactgcaggtacgcctgcaggaatcgccccatcatcgtcacaaaggtcttgttgctggtgaaggtcagctgcaacccgcggtgctcctcgttcagccaggtcttgcatacggccgccagagcttccacttggtcaggcagtagtttgaagttcgcctttagatcgttatccacgtggtacttgtccatcagcgcgcgcgcagcctccatgcccttctcccacgcagacacgatcggcacactcagcgggttcatcaccgtaatttcactttccgcttcgctgggctcttcctcttcctcttgcgtccgcataccacgcgccactgggtcgtcttcattcagccgccgcactgtgcgcttacctcctttgccatgcttgattagcaccggtgggttgctgaaacccaccatttgtagcgccacatcttctctttcttcctcgctgtccacgattacctctggtgatggcgggcgctcgggcttgggagaagggcgcttctttttcttcttgggcgcaatggccaaatccgccgccgaggtcgatggccgcgggctgggtgtgcgcggcaccagcgcgtcttgtgatgagtcttcctcgtcctcggactcgatacgccgcctcatccgcttttttgggggcgcccggggaggcggcggcgacggggacggggacgacacgtcctccatggttgggggacgtcgcgccgcaccgcgtccgcgctcgggggtggtttcgcgctgctcctcttcccgactggccatttccttctcctataggcagaaaaagatccacaaaagcgaagatcagcttcggcgcacgctggaagacgcggaggctctcttcagtaaatactgcgcgctgactcttaaggactagtttcgcgccctttctcaaatttaagcgcgaaaactacgtcatctccagcggccacacccggcgccagcacctgttgtcagcgccattggcgcgccggccggccgaatatcttcatttaaatgtttaaacatcgatgcggccgccgtttgtgttatgtttcaacgtgtttatttttcaattgcagaaaatttcaagtcatttttcattcagtagtatagccccaccaccacatagcttatacagatcaccgtaccttaatcaaactcacagaaccctagtattcaacctgccacctccctcccaacacacagagtacacagtcctttctccccggctggccttaaaaagcatcatatcatgggtaacagacatattcttaggtgttatattccacacggtttcctgtcgagccaaacgctcatcagtgatattaataaactccccgggcagctcacttaagttcatgtcgctgtccagctgctgagccacaggctgctgtccaacttgcggttgcttaacgggcggcgaaggagaagtccacgcctacatgggggtagagtcataatcgtgcatcaggatagggcggtggtgctgcagcagcgcgcgaataaactgctgccgccgccgctccgtcctgcaggaatacaacatggcagtggtctcctcagcgatgattcgcaccgcccgcagcataaggcgccttgtcctccgggcacagcagcgcaccctgatctcacttaaatcagcacagtaactgcagcacagcaccacaatattgttcaaaatcccacagtgcaaggcgctgtatccaaagctcatggcggggaccacagaacccacgtggccatcataccacaagcgcaggtagattaagtggcgacccctcataaacacgctggacataaacattacctcttttggcatgttgtaattcaccacctcccggtaccatataaacctctgattaaacatggcgccatccaccaccatcctaaaccagctggccaaaacctgcccgccggctatacactgcagggaaccgggactggaacaatgacagtggagagcccaggactcgtaaccatggatcatcatgctcgtcatgatatcaatgttggcacaacacaggcacacgtgcatacacttcctcaggattacaagctcctcccgcgttagaaccatatcccagggaacaacccattcctgaatcagcgtaaatcccacactgcagggaagacctcgcacgtaactcacgttgtgcattgtcaaagtgttacattcgggcagcagcggatgatcctccagtatggtagcgcgggtttctgtctcaaaaggaggtagacgatccctactgtacggagtgcgccgagacaaccgagatcgtgttggtcgtagtgtcatgccaaatggaacgccggacgtagtcatatttcctgaagcaaaaccaggtgcgggcgtgacaaacagatctgcgtctccggtctcgccgcttagatcgctctgtgtagtagttgtagtatatccactctctcaaagcatccaggcgccccctggcttcgggttctatgtaaactccttcatgcgccgctgccctgataacatccaccaccgcagaataagccacacccagccaacctacacattcgttctgcgagtcacacacgggaggagcgggaagagctggaagaaccatgtttttttttttattccaaaagattatccaaaacctcaaaatgaagatctattaagtgaacgcgctcccctccggtggcgtggtcaaactctacagccaaagaacagataatggcatttgtaagatgttgcacaatggcttccaaaaggcaaacggccctcacgtccaagtggacgtaaaggctaaacccttcagggtgaatctcctctataaacattccagcaccttcaaccatgcccaaataattctcatctcgccaccttctcaatatatctctaagcaaatcccgaatattaagtccggccattgtaaaaatctgctccagagcgccctccaccttcagcctcaagcagcgaatcatgattgcaaaaattcaggttcctcacagacctgtataagattcaaaagcggaacattaacaaaaataccgcgatcccgtaggtcccttcgcagggccagctgaacataatcgtgcaggtctgcacggaccagcgcggccacttccccgccaggaaccatgacaaaagaacccacactgattatgacacgcatactcggagctatgctaaccagcgtagccccgatgtaagcttgttgcatgggcggcgatataaaatgcaaggtgctgctcaaaaaatcaggcaaagcctcgcgcaaaaaagaaagcacatcgtagtcatgctcatgcagataaaggcaggtaagctccggaaccaccacagaaaaagacaccatttttctctcaaacatgtctgcgggtttctgcataaacacaaaataaaataacaaaaaaacatttaaacattagaagcctgtcttacaacaggaaaaacaacccttataagcataagacggactacggccatgccggcgtgaccgtaaaaaaactggtcaccgtgattaaaaagcaccaccgacagctcctcggtcatgtccggagtcataatgtaagactcggtaaacacatcaggttgattcacatcggtcagtgctaaaaagcgaccgaaatagcccgggggaatacatacccgcaggcgtagagacaacattacagcccccataggaggtataacaaaattaataggagagaaaaacacataaacacctgaaaaaccctcctgcctaggcaaaatagcaccctcccgctccagaacaacatacagcgcttccacagcggcagccataacagtcagccttaccagtaaaaaagaaaacctattaaaaaaacaccactcgacacggcaccagctcaatcagtcacagtgtaaaaaagggccaagtgcagagcgagtatatataggactaaaaaatgacgtaacggttaaagtccacaaaaaacacccagaaaaccgcacgcgaacctacgcccagaaacgaaagccaaaaaacccacaacttcctcaaatcgtcacttccgttttcccacgttacgtcacttcccattttaagaaaactacaattcccaacacatacaagttactccgcccttaattaaatcggatccgatatctagatgtattcgcgaggtaccgagctcgaattctctggccgtcgttttacaacgtcgtgactgggaaaaccctggcgttacccaacttaatcgccttgcagcacatccccctttcgccagctggcgtaatagcgaagaggcccgcaccgatcgcccttcccaacagttgcgcagcctgaatggcgaatggcgcctgatgcggtattttctccttacgcatctgtgcggtatttcacaccgcatatggtgcactctcagtacaatctgctctgatgccgcatagttaagccagccccgacacccgccaacacccgctgacgcgccctgacgggcttgtctgctcccggcatccgcttacagacaagctgtgaccgtctccgggagctgcatgtgtcagaggttttcaccgtcatcaccgaaacgcgcga

SEQ ID NO: 44 - DNA, 9413 bp, synthetic construct
  source 1..9413: mol_type = other DNA
tgcagctctggcccgtgtctcaaaatctctgatgttacattgcacaagataaaaatatatcatcatgaacaataaaactgtctgcttacataaacagtaatacaaggggtgttatgagccatattcaacgggaaacgtcgaggccgcgattaaattccaacatggatgctgatttatatgggtataaatgggctcgcgataatgtcgggcaatcaggtgcgacaatctatcgcttgtatgggaagcccgatgcgccagagttgtttctgaaacatggcaaaggtagcgttgccaatgatgttacagatgagatggtcagactaaactggctgacggaatttatgcctcttccgaccatcaagcattttatccgtactcctgatgatgcatggttactcaccactgcgatccccggaaaaacagcattccaggtattagaagaatatcctgattcaggtgaaaatattgttgatgcgctggcagtgttcctgcgccggttgcattcgattcctgtttgtaattgtccttttaacagcgatcgcgtatttcgtctcgctcaggcgcaatcacgaatgaataacggtttggttgatgcgagtgattttgatgacgagcgtaatggctggcctgttgaacaagtctggaaagaaatgcataaacttttgccattctcaccggattcagtcgtcactcatggtgatttctcacttgataaccttatttttgacgaggggaaattaataggttgtattgatgttggacgagtcggaatcgcagaccgataccaggatcttgccatcctatggaactgcctcggtgagttttctccttcattacagaaacggctttttcaaaaatatggtattgataatcctgatatgaataaattgcagtttcatttgatgctcgatgagtttttctaatcagaattggttaattggttgtaacattattcagattgggcttgatttaaaacttcatttttaatttaaaaggatctaggtgaagatcctttttgataatctcatgaccaaaatcccttaacgtgagttttcgttccactgagcgtcagaccccgtagaaaagatcaaaggatcttcttgagatcctttttttctgcgcgtaatctgctgcttgcaaacaaaaaaaccaccgctaccagcggtggtttgtttgccggatcaagagctaccaactctttttccgaaggtaactggcttcagcagagcgcagataccaaatactgttcttctagtgtagccgtagttaggccaccacttcaagaactctgtagcaccgcctacatacctcgctctgctaatcctgttaccagtggctgctgccagtggcgataagtcgtgtcttaccgggttggactcaagacgatagttaccggataaggcgcagcggtcgggctgaacggggggttcgtgcacacagcccagcttggagcgaacgacctacaccgaactgagatacctacagcgtgagctatgagaaagcgccacgcttcccgaagggagaaaggcggacaggtatccggtaagcggcagggtcggaacaggagagcgcacgagggagcttccagggggaaacgcctggtatctttatagtcctgtcgggtttcgccacctctgacttgagcgtcgatttttgtgatgctcgtcaggggggcggagcctatggaaaaacgccagcaacgcggcctttttacggttcctggccttttgctggccttttgctcacatgttctttcctgcgttatcccctgattctgtggataaccgtattaccgcctttgagtgagctgataccgctcgccgcagccgaacgaccgagcgcagcgagtcagtgagcgaggaagcggaagagcgcccaatacgcaaaccgcctctccccgcgcgttggccgattcattaatgcagctggcacgacaggtttcccgactggaaagcgggcagtgagcgcaacgcaattaatgtgagttagctcactcattaggcaccccaggctttacactttatgcttccggctcgtatgttgtgtggaattgtgagcggataacaatttcacacaggaaacagctatgaccatgattacaccaagcttgcatgcaggcctctgcagtcgaccagaagcaccatgtccttgggtccggcctgctgaatgcgcaggcggtcggccatgccccaggcttcgttttgacatcggcgcaggtctttgtagtagtcttgcatgagcctttctaccggcacttcttcttctccttcctcttgtcctgcatctcttgcatctatcgctgcggcggcggcggagtttggccgtaggtggcgccctcttcctcccatgcgtgtgaccccgaagcccctcatcggctgaagcagggctaggtcggcgacaacgcgctcggctaatatggcctgctgcacctgcgtgagggtagactggaagtcatccatgtccacaaagcggtggtatgcgcccgtgttgatggtgtaagtgcagttggccataacggaccagttaacggtctggtgacccggctgcgagagctcggtgtacctgagacgcgagtaagccctcgagtcaaatacgtagtcgttgcaagtccgcaccaggtactggtatcccaccaaaaagtgcggcggcggctggcggtagaggggccagcgtagggtggccggggctccgggggcgagatcttccaacataaggcgatgatatccgtagatgtacctggacatccaggtgatgccggcggcggtggtggaggcgcgcggaaagtcgcggacgcggttccagatgttgcgcagcggcaaaaagtgctccatggtcgggacgctctggccggtcaggcgcgcgcaatcgttgacgctctagcgtgcaaaaggagagcctgtaagcgggcactcttccgtggtctggtggataaattcgcaagggtatcatggcggacgaccggggttcgagccccgtatccggccgtccgccgtgatccatgcggttaccgcccgcgtgtcgaacccaggtgtgcgacgtcagacaacgggggagtgctccttttggcttccttccaggcgcggcggctgctgcgctagcttttttggccactggccgcgcgcagcgtaagcggttaggctggaaagcgaaagcattaagtggctcgctccctgtagccggagggttattttccaagggttgagtcgcgggacccccggttcgagtctcggaccgagactgggggcgtacactggatggcctttgcctggaacccgcactcaaaaacatgctacctctttgagccctttggcttttctgaccagcgactcaagcaggtttaccagtttgagtacgagtcactcctgcgccgtagcgccattgcttcttcccccgaccgctgtataacgctggaaaagtccacccaaagcgtacaggggcccaactcggccgcctgtggactattctgctgcatgtttctccacgcctttgccaactggccccaaactcccatggatcacaaccccaccatgaaccttattaccggggtacccaactccatgctcaacagtccccaggtacagcccaccctgcgtcgcaaccaggaacagctctacagcttcctggagcgccactcgccctacttccgcagccacagtgcgcagattaggagcgccacttctttttgtcacttgaaaaacatgtaaaaataatgtactagagacactttcaataaaggcaaatgcttttatttgtacactctcgggtgattatttacccccacccttgccgtctgcgccgtttaaaaatcaaaggggttctgccgcgcatcgctatgcgccactggcagggacacgttgcgatactggtgtttagtgctccacttaaactcaggcacaaccatccgcggcagctcggtgaagttttcactccacaggctgcgcaccatcaccaacgcgtttagcaggtcgggcgccgatatcttgaagtcgcagttggggcctccgccctgcgcgcgcgagttgcgatacacagggttgcagcactggaacactatcagcgccgggtggtgcacgctggccagcacgctcttgtcggagatcagatccgcgtccaggtcctccgcgttgctcagggcgaacggagtcaactttggtagctgccttcccaaaaagggcgcgtgcccaggctttgagttgcactcgcaccgtagtggcatcaaaaggtgaccgtgcccggtctgggcgttaggatacagcgcctgcataaaagccttgatctgcttaaaagccacctgagcctttgcgccttcagagaagaacatgccgcaagacttgccggaaaactgattggccggacaggccgcgtcgtgcacgcagcaccttgcgtcggtgttggagatctgcaccacatttcggccccaccggttcttcacgatcttggccttgctagactgctccttcagcgcgcgctgcccgttttcgctcgtcacatccatttcaatcacgtgctccttatttatcataatgcttccgtgtagacacttaagctcgccttcgatctcagcgcagcggtgcagccacaacgcgcagcccgtgggctcgtgatgcttgtaggtcacctctgcaaacgactgcaggtacgcctgcaggaatcgccccatcatcgtcacaaaggtcttgttgctggtgaaggtcagctgcaacccgcggtgctcctcgttcagccaggtcttgcatacggccgccagagcttccacttggtcaggcagtagtttgaagttcgcctttagatcgttatccacgtggtacttgtccatcagcgcgcgcgcagcctccatgcccttctcccacgcagacacgatcggcacactcagcgggttcatcaccgtaatttcactttccgcttcgctgggctcttcctcttcctcttgcgtccgcataccacgcgccactgggtcgtcttcattcagccgccgcactgtgcgcttacctcctttgccatgcttgattagcaccggtgggttgctgaaacccaccatttgtagcgccacatcttctctttcttcctcgctgtccacgattacctctggtgatggcgggcgctcgggcttgggagaagggcgcttctttttcttcttgggcgcaatggccaaatccgccgccgaggtcgatggccgcgggctgggtgtgcgcggcaccagcgcgtcttgtgatgagtcttcctcgtcctcggactcgatacgccgcctcatccgcttttttgggggcgcccggggaggcggcggcgacggggacggggacgacacgtcctccatggttgggggacgtcgcgccgcaccgcgtccgcgctcgggggtggtttcgcgctgctcctcttcccgactggccatttccttctcctataggcagaaaaagatccacaaaagcgaagatcagcttcggcgcacgctggaagacgcggaggctctcttcagtaaatactgcgcgctgactcttaaggactagtttcgcgccctttctcaaatttaagcgcgaaaactacgtcatctccagcggccacacccggcgccagcacctgttgtcagcgccattggcgcgcccgcccgccgcgcgcttcgctttttatagggccgccgccgccgccgcctcgccataaaaggaaactttcggagcgcgccgctctgattggctgccgccgcacctctccgcctcgccccgccccgcccctcgccccgccccgccccgcctggcgcgcgccccccccccccccccgcccccatcgctgcacaaaataattaaaaaataaataaatacaaaattgggggtggggaggggggggagatggggagagtgaagcagaacgtggggctcacctcgaggccggccgaatatcttcatttaaatgtttaaacatcgatgcggccgccgtttgtgttatgtttcaacgtgtttatttttcaattgcagaaaatttcaagtcatttttcattcagtagtatagccccaccaccacatagcttatacagatcaccgtaccttaatcaaactcacagaaccctagtattcaacctgccacctccctcccaacacacagagtacacagtcctttctccccggctggccttaaaaagcatcatatcatgggtaacagacatattcttaggtgttatattccacacggtttcctgtcgagccaaacgctcatcagtgatattaataaactccccgggcagctcacttaagttcatgtcgctgtccagctgctgagccacaggctgctgtccaacttgcggttgcttaacgggcggcgaaggagaagtccacgcctacatgggggtagagtcataatcgtgcatcaggatagggcggtggtgctgcagcagcgcgcgaataaactgctgccgccgccgctccgtcctgcaggaatacaacatggcagtggtctcctcagcgatgattcgcaccgcccgcagcataaggcgccttgtcctccgggcacagcagcgcaccctgatctcacttaaatcagcacagtaactgcagcacagcaccacaatattgttcaaaatcccacagtgcaaggcgctgtatccaaagctcatggcggggaccacagaacccacgtggccatcataccacaagcgcaggtagattaagtggcgacccctcataaacacgctggacataaacattacctcttttggcatgttgtaattcaccacctcccggtaccatataaacctctgattaaacatggcgccatccaccaccatcctaaaccagctggccaaaacctgcccgccggctatacactgcagggaaccgggactggaacaatgacagtggagagcccaggactcgtaaccatggatcatcatgctcgtcatgatatcaatgttggcacaacacaggcacacgtgcatacacttcctcaggattacaagctcctcccgcgttagaaccatatcccagggaacaacccattcctgaatcagcgtaaatcccacactgcagggaagacctcgcacgtaactcacgttgtgcattgtcaaagtgttacattcgggcagcagcggatgatcctccagtatggtagcgcgggtttctgtctcaaaaggaggtagacgatccctactgtacggagtgcgccgagacaaccgagatcgtgttggtcgtagtgtcatgccaaatggaacgccggacgtagtcatatttcctgaagcaaaaccaggtgcgggcgtgacaaacagatctgcgtctccggtctcgccgcttagatcgctctgtgtagtagttgtagtatatccactctctcaaagcatccaggcgccccctggcttcgggttctatgtaaactccttcatgcgccgctgccctgataacatccaccaccgcagaataagccacacccagccaacctacacattcgttctgcgagtcacacacgggaggagcgggaagagctggaagaaccatgtttttttttttattccaaaagattatccaaaacctcaaaatgaagatctattaagtgaacgcgctcccctccggtggcgtggtcaaactctacagccaaagaacagataatggcatttgtaagatgttgcacaatggcttccaaaaggcaaacggccctcacgtccaagtggacgtaaaggctaaacccttcagggtgaatctcctctataaacattccagcaccttcaaccatgcccaaataattctcatctcgccaccttctcaatatatctctaagcaaatcccgaatattaagtccggccattgtaaaaatctgctccagagcgccctccaccttcagcctcaagcagcgaatcatgattgcaaaaattcaggttcctcacagacctgtataagattcaaaagcggaacattaacaaaaataccgcgatcccgtaggtcccttcgcagggccagctgaacataatcgtgcaggtctgcacggaccagcgcggccacttccccgccaggaaccatgacaaaagaacccacactgattatgacacgcatactcggagctatgctaaccagcgtagccccgatgtaagcttgttgcatgggcggcgatataaaatgcaaggtgctgctcaaaaaatcaggcaaagcctcgcgcaaaaaagaaagcacatcgtagtcatgctcatgcagataaaggcaggtaagctccggaaccaccacagaaaaagacaccatttttctctcaaacatgtctgcgggtttctgcataaacacaaaataaaataacaaaaaaacatttaaacattagaagcctgtcttacaacaggaaaaacaacccttataagcataagacggactacggccatgccggcgtgaccgtaaaaaaactggtcaccgtgattaaaaagcaccaccgacagctcctcggtcatgtccggagtcataatgtaagactcggtaaacacatcaggttgattcacatcggtcagtgctaaaaagcgaccgaaatagcccgggggaatacatacccgcaggcgtagagacaacattacagcccccataggaggtataacaaaattaataggagagaaaaacacataaacacctgaaaaaccctcctgcctaggcaaaatagcaccctcccgctccagaacaacatacagcgcttccacagcggcagccataacagtcagccttaccagtaaaaaagaaaacctattaaaaaaacaccactcgacacggcaccagctcaatcagtcacagtgtaaaaaagggccaagtgcagagcgagtatatataggactaaaaaatgacgtaacggttaaagtccacaaaaaacacccagaaaaccgcacgcgaacctacgcccagaaacgaaagccaaaaaacccacaacttcctcaaatcgtcacttccgttttcccacgttacgtcacttcccattttaagaaaactacaattcccaacacatacaagttactccgcccttaattaaatcggatccgatatctagatgtattcgcgaggtaccgagctcgaattctctggccgtcgttttacaacgtcgtgactgggaaaaccctggcgttacccaacttaatcgccttgcagcacatccccctttcgccagctggcgtaatagcgaagaggcccgcaccgatcgcccttcccaacagttgcgcagcctgaatggcgaatggcgcctgatgcggtattttctccttacgcatctgtgcggtatttcacaccgcatatggtgcactctcagtacaatctgctctgatgccgcatagttaagccagccccgacacccgccaacacccgctgacgcgccctgacgggcttgtctgctcccggcatccgcttacagacaagctgtgaccgtctccgggagctgcatgtgtcagaggttttcaccgtcatcaccgaaacgcgcga

SEQ ID NO: 45 - DNA, 8514 bp, synthetic construct
  source 1..8514: mol_type = other DNA
tgcagctctggcccgtgtctcaaaatctctgatgttacattgcacaagataaaaatatatcatcatgaacaataaaactgtctgcttacataaacagtaatacaaggggtgttatgagccatattcaacgggaaacgtcgaggccgcgattaaattccaacatggatgctgatttatatgggtataaatgggctcgcgataatgtcgggcaatcaggtgcgacaatctatcgcttgtatgggaagcccgatgcgccagagttgtttctgaaacatggcaaaggtagcgttgccaatgatgttacagatgagatggtcagactaaactggctgacggaatttatgcctcttccgaccatcaagcattttatccgtactcctgatgatgcatggttactcaccactgcgatccccggaaaaacagcattccaggtattagaagaatatcctgattcaggtgaaaatattgttgatgcgctggcagtgttcctgcgccggttgcattcgattcctgtttgtaattgtccttttaacagcgatcgcgtatttcgtctcgctcaggcgcaatcacgaatgaataacggtttggttgatgcgagtgattttgatgacgagcgtaatggctggcctgttgaacaagtctggaaagaaatgcataaacttttgccattctcaccggattcagtcgtcactcatggtgatttctcacttgataaccttatttttgacgaggggaaattaataggttgtattgatgttggacgagtcggaatcgcagaccgataccaggatcttgccatcctatggaactgcctcggtgagttttctccttcattacagaaacggctttttcaaaaatatggtattgataatcctgatatgaataaattgcagtttcatttgatgctcgatgagtttttctaatcagaattggttaattggttgtaacattattcagattgggcttgatttaaaacttcatttttaatttaaaaggatctaggtgaagatcctttttgataatctcatgaccaaaatcccttaacgtgagttttcgttccactgagcgtcagaccccgtagaaaagatcaaaggatcttcttgagatcctttttttctgcgcgtaatctgctgcttgcaaacaaaaaaaccaccgctaccagcggtggtttgtttgccggatcaagagctaccaactctttttccgaaggtaactggcttcagcagagcgcagataccaaatactgttcttctagtgtagccgtagttaggccaccacttcaagaactctgtagcaccgcctacatacctcgctctgctaatcctgttaccagtggctgctgccagtggcgataagtcgtgtcttaccgggttggactcaagacgatagttaccggataaggcgcagcggtcgggctgaacggggggttcgtgcacacagcccagcttggagcgaacgacctacaccgaactgagatacctacagcgtgagctatgagaaagcgccacgcttcccgaagggagaaaggcggacaggtatccggtaagcggcagggtcggaacaggagagcgcacgagggagcttccagggggaaacgcctggtatctttatagtcctgtcgggtttcgccacctctgacttgagcgtcgatttttgtgatgctcgtcaggggggcggagcctatggaaaaacgccagcaacgcggcctttttacggttcctggccttttgctggccttttgctcacatgttctttcctgcgttatcccctgattctgtggataaccgtattaccgcctttgagtgagctgataccgctcgccgcagccgaacgaccgagcgcagcgagtcagtgagcgaggaagcggaagagcgcccaatacgcaaaccgcctctccccgcgcgttggccgattcattaatgcagctggcacgacaggtttcccgactggaaagcgggcagtgagcgcaacgcaattaatgtgagttagctcactcattaggcaccccaggctttacactttatgcttccggctcgtatgttgtgtggaattgtgagcggataacaatttcacacaggaaacagctatgaccatgattacaccaagcttgcatgcaggcctatccgtagatgtacctggacatccaggtgatgccggcggcggtggtggaggcgcgcggaaagtcgcggacgcggttccagatgttgcgcagcggcaaaaagtgctccatggtcgggacgctctggccggtgaggcgtgcgcagtcgttgacgctctagaccgtgcaaaaggagagcctgtaagcgggcactcttccgtggtctggtggataaattcgcaagggtatcatggcggacgaccggggttcgaaccccggatccggccgtccgccgtgatccatgcggttaccgcccgcgtgtcgaacccaggtgtgcgacgtcagacaacgggggagcgctccttttggcttccttccaggcgcggcggctgctgcgctagcttttttggccactggccgcgcgcggcgtaagcggttaggctggaaagcgaaagcattaagtggctcgctccctgtagccggagggttattttccaagggttgagtcgcaggacccccggttcgagtctcgggccggccggactgcggcgaacgggggtttgcctccccgtcatgcaagaccccgcttgcaaattcctccggaaacagggacgagccccttttttgcttttcccagatgcatccggtgctgcggcagatgcgcccccctcctcagcagcggcaagagcaagagcagcggcagacatgcagggcaccctccccttctcctaccgcgtcaggaggggcaacatctgtacactctcgggtgattatttacccccacccttgccgtctgcgccgtttaaaaatcaaaggggttctgccgcgcatcgctatgcgccactggcagggacacgttgcgatactggtgtttagtgctccacttaaactcaggcacaaccatccgcggcagctcggtgaagttttcactccacaggctgcgcaccatcaccaacgcgtttagcaggtcgggcgccgatatcttgaagtcgcagttggggcctccgccctgcgcgcgcgagttgcgatacacagggttgcagcactggaacactatcagcgccgggtggtgcacgctggccagcacgctcttgtcggagatcagatccgcgtccaggtcctccgcgttgctcagggcgaacggagtcaactttggtagctgccttcccaaaaagggcgcgtgcccaggctttgagttgcactcgcaccgtagtggcatcaaaaggtgaccgtgcccggtctgggcgttaggatacagcgcctgcataaaagccttgatctgcttaaaagccacctgagcctttgcgccttcagagaagaacatgccgcaagacttgccggaaaactgattggccggacaggccgcgtcgtgcacgcagcaccttgcgtcggtgttggagatctgcaccacatttcggccccaccggttcttcacgatcttggccttgctagactgctccttcagcgcgcgctgcccgttttcgctcgtcacatccatttcaatcacgtgctccttatttatcataatgcttccgtgtagacacttaagctcgccttcgatctcagcgcagcggtgcagccacaacgcgcagcccgtgggctcgtgatgcttgtaggtcacctctgcaaacgactgcaggtacgcctgcaggaatcgccccatcatcgtcacaaaggtcttgttgctggtgaaggtcagctgcaacccgcggtgctcctcgttcagccaggtcttgcatacggccgccagagcttccacttggtcaggcagtagtttgaagttcgcctttagatcgttatccacgtggtacttgtccatcagcgcgcgcgcagcctccatgcccttctcccacgcagacacgatcggcacactcagcgggttcatcaccgtaatttcactttccgcttcgctgggctcttcctcttcctcttgcgtccgcataccacgcgccactgggtcgtcttcattcagccgccgcactgtgcgcttacctcctttgccatgcttgattagcaccggtgggttgctgaaacccaccatttgtagcgccacatcttctctttcttcctcgctgtccacgattacctctggtgatggcgggcgctcgggcttgggagaagggcgcttctttttcttcttgggcgcaatggccaaatccgccgccgaggtcgatggccgcgggctgggtgtgcgcggcaccagcgcgtcttgtgatgagtcttcctcgtcctcggactcgatacgccgcctcatccgcttttttgggggcgcccggggaggcggcggcgacggggacggggacgacacgtcctccatggttgggggacgtcgcgccgcaccgcgtccgcgctcgggggtggtttcgcgctgctcctcttcccgactggccatttccttctcctataggcagaaaaagatccacaaaagcgaagatcagcttcggcgcacgctggaagacgcggaggctctcttcagtaaatactgcgcgctgactcttaaggactagtttcgcgccctttctcaaatttaagcgcgaaaactacgtcatctccagcggccacacccggcgccagcacctgttgtcagcgccattggcgcgcccgcccgccgcgcgcttcgctttttatagggccgccgccgccgccgcctcgccataaaaggaaactttcggagcgcgccgctctgattggctgccgccgcacctctccgcctcgccccgccccgcccctcgccccgccccgccccgcctggcgcgcgccccccccccccccccgcccccatcgctgcacaaaataattaaaaaataaataaatacaaaattgggggtggggaggggggggagatggggagagtgaagcagaacgtggggctcacctcgaggccggccgaatatcttcatttaaatgtttaaacatcgatgcggccgccgtttgtgttatgtttcaacgtgtttatttttcaattgcagaaaatttcaagtcatttttcattcagtagtatagccccaccaccacatagcttatacagatcaccgtaccttaatcaaactcacagaaccctagtattcaacctgccacctccctcccaacacacagagtacacagtcctttctccccggctggccttaaaaagcatcatatcatgggtaacagacatattcttaggtgttatattccacacggtttcctgtcgagccaaacgctcatcagtgatattaataaactccccgggcagctcacttaagttcatgtcgctgtccagctgctgagccacaggctgctgtccaacttgcggttgcttaacgggcggcgaaggagaagtccacgcctacatgggggtagagtcataatcgtgcatcaggatagggcggtggtgctgcagcagcgcgcgaataaactgctgccgccgccgctccgtcctgcaggaatacaacatggcagtggtctcctcagcgatgattcgcaccgcccgcagcataaggcgccttgtcctccgggcacagcagcgcaccctgatctcacttaaatcagcacagtaactgcagcacagcaccacaatattgttcaaaatcccacagtgcaaggcgctgtatccaaagctcatggcggggaccacagaacccacgtggccatcataccacaagcgcaggtagattaagtggcgacccctcataaacacgctggacataaacattacctcttttggcatgttgtaattcaccacctcccggtaccatataaacctctgattaaacatggcgccatccaccaccatcctaaaccagctggccaaaacctgcccgccggctatacactgcagggaaccgggactggaacaatgacagtggagagcccaggactcgtaaccatggatcatcatgctcgtcatgatatcaatgttggcacaacacaggcacacgtgcatacacttcctcaggattacaagctcctcccgcgttagaaccatatcccagggaacaacccattcctgaatcagcgtaaatcccacactgcagggaagacctcgcacgtaactcacgttgtgcattgtcaaagtgttacattcgggcagcagcggatgatcctccagtatggtagcgcgggtttctgtctcaaaaggaggtagacgatccctactgtacggagtgcgccgagacaaccgagatcgtgttggtcgtagtgtcatgccaaatggaacgccggacgtagtcatatttcctgaagcaaaaccaggtgcgggcgtgacaaacagatctgcgtctccggtctcgccgcttagatcgctctgtgtagtagttgtagtatatccactctctcaaagcatccaggcgccccctggcttcgggttctatgtaaactccttcatgcgccgctgccctgataacatccaccaccgcagaataagccacacccagccaacctacacattcgttctgcgagtcacacacgggaggagcgggaagagctggaagaaccatgtttttttttttattccaaaagattatccaaaacctcaaaatgaagatctattaagtgaacgcgctcccctccggtggcgtggtcaaactctacagccaaagaacagataatggcatttgtaagatgttgcacaatggcttccaaaaggcaaacggccctcacgtccaagtggacgtaaaggctaaacccttcagggtgaatctcctctataaacattccagcaccttcaaccatgcccaaataattctcatctcgccaccttctcaatatatctctaagcaaatcccgaatattaagtccggccattgtaaaaatctgctccagagcgccctccaccttcagcctcaagcagcgaatcatgattgcaaaaattcaggttcctcacagacctgtataagattcaaaagcggaacattaacaaaaataccgcgatcccgtaggtcccttcgcagggccagctgaacataatcgtgcaggtctgcacggaccagcgcggccacttccccgccaggaaccatgacaaaagaacccacactgattatgacacgcatactcggagctatgctaaccagcgtagccccgatgtaagcttgttgcatgggcggcgatataaaatgcaaggtgctgctcaaaaaatcaggcaaagcctcgcgcaaaaaagaaagcacatcgtagtcatgctcatgcagataaaggcaggtaagctccggaaccaccacagaaaaagacaccatttttctctcaaacatgtctgcgggtttctgcataaacacaaaataaaataacaaaaaaacatttaaacattagaagcctgtcttacaacaggaaaaacaacccttataagcataagacggactacggccatgccggcgtgaccgtaaaaaaactggtcaccgtgattaaaaagcaccaccgacagctcctcggtcatgtccggagtcataatgtaagactcggtaaacacatcaggttgattcacatcggtcagtgctaaaaagcgaccgaaatagcccgggggaatacatacccgcaggcgtagagacaacattacagcccccataggaggtataacaaaattaataggagagaaaaacacataaacacctgaaaaaccctcctgcctaggcaaaatagcaccctcccgctccagaacaacatacagcgcttccacagcggcagccataacagtcagccttaccagtaaaaaagaaaacctattaaaaaaacaccactcgacacggcaccagctcaatcagtcacagtgtaaaaaagggccaagtgcagagcgagtatatataggactaaaaaatgacgtaacggttaaagtccacaaaaaacacccagaaaaccgcacgcgaacctacgcccagaaacgaaagccaaaaaacccacaacttcctcaaatcgtcacttccgttttcccacgttacgtcacttcccattttaagaaaactacaattcccaacacatacaagttactccgcccttaattaaatcggatccgatatctagatgtattcgcgaggtaccgagctcgaattctctggccgtcgttttacaacgtcgtgactgggaaaaccctggcgttacccaacttaatcgccttgcagcacatccccctttcgccagctggcgtaatagcgaagaggcccgcaccgatcgcccttcccaacagttgcgcagcctgaatggcgaatggcgcctgatgcggtattttctccttacgcatctgtgcggtatttcacaccgcatatggtgcactctcagtacaatctgctctgatgccgcatagttaagccagccccgacacccgccaacacccgctgacgcgccctgacgggcttgtctgctcccggcatccgcttacagacaagctgtgaccgtctccgggagctgcatgtgtcagaggttttcaccgtcatcaccgaaacgcgcga

SEQ ID NO: 46 - DNA, 8649 bp, synthetic construct
  source 1..8649: mol_type = other DNA
tgcagctctggcccgtgtctcaaaatctctgatgttacattgcacaagataaaaatatatcatcatgaacaataaaactgtctgcttacataaacagtaatacaaggggtgttatgagccatattcaacgggaaacgtcgaggccgcgattaaattccaacatggatgctgatttatatgggtataaatgggctcgcgataatgtcgggcaatcaggtgcgacaatctatcgcttgtatgggaagcccgatgcgccagagttgtttctgaaacatggcaaaggtagcgttgccaatgatgttacagatgagatggtcagactaaactggctgacggaatttatgcctcttccgaccatcaagcattttatccgtactcctgatgatgcatggttactcaccactgcgatccccggaaaaacagcattccaggtattagaagaatatcctgattcaggtgaaaatattgttgatgcgctggcagtgttcctgcgccggttgcattcgattcctgtttgtaattgtccttttaacagcgatcgcgtatttcgtctcgctcaggcgcaatcacgaatgaataacggtttggttgatgcgagtgattttgatgacgagcgtaatggctggcctgttgaacaagtctggaaagaaatgcataaacttttgccattctcaccggattcagtcgtcactcatggtgatttctcacttgataaccttatttttgacgaggggaaattaataggttgtattgatgttggacgagtcggaatcgcagaccgataccaggatcttgccatcctatggaactgcctcggtgagttttctccttcattacagaaacggctttttcaaaaatatggtattgataatcctgatatgaataaattgcagtttcatttgatgctcgatgagtttttctaatcagaattggttaattggttgtaacattattcagattgggcttgatttaaaacttcatttttaatttaaaaggatctaggtgaagatcctttttgataatctcatgaccaaaatcccttaacgtgagttttcgttccactgagcgtcagaccccgtagaaaagatcaaaggatcttcttgagatcctttttttctgcgcgtaatctgctgcttgcaaacaaaaaaaccaccgctaccagcggtggtttgtttgccggatcaagagctaccaactctttttccgaaggtaactggcttcagcagagcgcagataccaaatactgttcttctagtgtagccgtagttaggccaccacttcaagaactctgtagcaccgcctacatacctcgctctgctaatcctgttaccagtggctgctgccagtggcgataagtcgtgtcttaccgggttggactcaagacgatagttaccggataaggcgcagcggtcgggctgaacggggggttcgtgcacacagcccagcttggagcgaacgacctacaccgaactgagatacctacagcgtgagctatgagaaagcgccacgcttcccgaagggagaaaggcggacaggtatccggtaagcggcagggtcggaacaggagagcgcacgagggagcttccagggggaaacgcctggtatctttatagtcctgtcgggtttcgccacctctgacttgagcgtcgatttttgtgatgctcgtcaggggggcggagcctatggaaaaacgccagcaacgcggcctttttacggttcctggccttttgctggccttttgctcacatgttctttcctgcgttatcccctgattctgtggataaccgtattaccgcctttgagtgagctgataccgctcgccgcagccgaacgaccgagcgcagcgagtcagtgagcgaggaagcggaagagcgcccaatacgcaaaccgcctctccccgcgcgttggccgattcattaatgcagctggcacgacaggtttcccgactggaaagcgggcagtgagcgcaacgcaattaatgtgagttagctcactcattaggcaccccaggctttacactttatgcttccggctcgtatgttgtgtggaattgtgagcggataacaatttcacacaggaaacagctatgaccatgattacaccaagcttgcatgcaggcctatccgtagatgtacctggacatccaggtgatgccggcggcggtggtggaggcgcgcggaaagtcgcggacgcggttccagatgttgcgcagcggcaaaaagtgctccatggtcgggacgctctggccggtgaggcgtgcgcagtcgttgacgctctagaccgtgcaaaaggagagcctgtaagcgggcactcttccgtggtctggtggataaattcgcaagggtatcatggcggacgaccggggttcgaaccccggatccggccgtccgccgtgatccatgcggttaccgcccgcgtgtcgaacccaggtgtgcgacgtcagacaacgggggagcgctccttttggcttccttccaggcgcggcggctgctgcgctagcttttttggccactggccgcgcgcggcgtaagcggttaggctggaaagcgaaagcattaagtggctcgctccctgtagccggagggttattttccaagggttgagtcgcaggacccccggttcgagtctcgggccggccggactgcggcgaacgggggtttgcctccccgtcatgcaagaccccgcttgcaaattcctccggaaacagggacgagccccttttttgcttttcccagatgcatccggtgctgcggcagatgcgcccccctcctcagcagcggcaagagcaagagcagcggcagacatgcagggcaccctccccttctcctaccgcgtcaggaggggcaacatcgatccagacatgataagatacattgatgagtttggacaaaccacaactagaatgcagtgaaaaaaatgctttatttgtgaaatttgtgatgctattgctttatttgtaaccattataagctgcaataaacaagtttgtacactctcgggtgattatttacccccacccttgccgtctgcgccgtttaaaaatcaaaggggttctgccgcgcatcgctatgcgccactggcagggacacgttgcgatactggtgtttagtgctccacttaaactcaggcacaaccatccgcggcagctcggtgaagttttcactccacaggctgcgcaccatcaccaacgcgtttagcaggtcgggcgccgatatcttgaagtcgcagttggggcctccgccctgcgcgcgcgagttgcgatacacagggttgcagcactggaacactatcagcgccgggtggtgcacgctggccagcacgctcttgtcggagatcagatccgcgtccaggtcctccgcgttgctcagggcgaacggagtcaactttggtagctgccttcccaaaaagggcgcgtgcccaggctttgagttgcactcgcaccgtagtggcatcaaaaggtgaccgtgcccggtctgggcgttaggatacagcgcctgcataaaagccttgatctgcttaaaagccacctgagcctttgcgccttcagagaagaacatgccgcaagacttgccggaaaactgattggccggacaggccgcgtcgtgcacgcagcaccttgcgtcggtgttggagatctgcaccacatttcggccccaccggttcttcacgatcttggccttgctagactgctccttcagcgcgcgctgcccgttttcgctcgtcacatccatttcaatcacgtgctccttatttatcataatgcttccgtgtagacacttaagctcgccttcgatctcagcgcagcggtgcagccacaacgcgcagcccgtgggctcgtgatgcttgtaggtcacctctgcaaacgactgcaggtacgcctgcaggaatcgccccatcatcgtcacaaaggtcttgttgctggtgaaggtcagctgcaacccgcggtgctcctcgttcagccaggtcttgcatacggccgccagagcttccacttggtcaggcagtagtttgaagttcgcctttagatcgttatccacgtggtacttgtccatcagcgcgcgcgcagcctccatgcccttctcccacgcagacacgatcggcacactcagcgggttcatcaccgtaatttcactttccgcttcgctgggctcttcctcttcctcttgcgtccgcataccacgcgccactgggtcgtcttcattcagccgccgcactgtgcgcttacctcctttgccatgcttgattagcaccggtgggttgctgaaacccaccatttgtagcgccacatcttctctttcttcctcgctgtccacgattacctctggtgatggcgggcgctcgggcttgggagaagggcgcttctttttcttcttgggcgcaatggccaaatccgccgccgaggtcgatggccgcgggctgggtgtgcgcggcaccagcgcgtcttgtgatgagtcttcctcgtcctcggactcgatacgccgcctcatccgcttttttgggggcgcccggggaggcggcggcgacggggacggggacgacacgtcctccatggttgggggacgtcgcgccgcaccgcgtccgcgctcgggggtggtttcgcgctgctcctcttcccgactggccatttccttctcctataggcagaaaaagatccacaaaagcgaagatcagcttcggcgcacgctggaagacgcggaggctctcttcagtaaatactgcgcgctgactcttaaggactagtttcgcgccctttctcaaatttaagcgcgaaaactacgtcatctccagcggccacacccggcgccagcacctgttgtcagcgccattggcgcgcccgcccgccgcgcgcttcgctttttatagggccgccgccgccgccgcctcgccataaaaggaaactttcggagcgcgccgctctgattggctgccgccgcacctctccgcctcgccccgccccgcccctcgccccgccccgccccgcctggcgcgcgccccccccccccccccgcccccatcgctgcacaaaataattaaaaaataaataaatacaaaattgggggtggggaggggggggagatggggagagtgaagcagaacgtggggctcacctcgaggccggccgaatatcttcatttaaatgtttaaacatcgatgcggccgccgtttgtgttatgtttcaacgtgtttatttttcaattgcagaaaatttcaagtcatttttcattcagtagtatagccccaccaccacatagcttatacagatcaccgtaccttaatcaaactcacagaaccctagtattcaacctgccacctccctcccaacacacagagtacacagtcctttctccccggctggccttaaaaagcatcatatcatgggtaacagacatattcttaggtgttatattccacacggtttcctgtcgagccaaacgctcatcagtgatattaataaactccccgggcagctcacttaagttcatgtcgctgtccagctgctgagccacaggctgctgtccaacttgcggttgcttaacgggcggcgaaggagaagtccacgcctacatgggggtagagtcataatcgtgcatcaggatagggcggtggtgctgcagcagcgcgcgaataaactgctgccgccgccgctccgtcctgcaggaatacaacatggcagtggtctcctcagcgatgattcgcaccgcccgcagcataaggcgccttgtcctccgggcacagcagcgcaccctgatctcacttaaatcagcacagtaactgcagcacagcaccacaatattgttcaaaatcccacagtgcaaggcgctgtatccaaagctcatggcggggaccacagaacccacgtggccatcataccacaagcgcaggtagattaagtggcgacccctcataaacacgctggacataaacattacctcttttggcatgttgtaattcaccacctcccggtaccatataaacctctgattaaacatggcgccatccaccaccatcctaaaccagctggccaaaacctgcccgccggctatacactgcagggaaccgggactggaacaatgacagtggagagcccaggactcgtaaccatggatcatcatgctcgtcatgatatcaatgttggcacaacacaggcacacgtgcatacacttcctcaggattacaagctcctcccgcgttagaaccatatcccagggaacaacccattcctgaatcagcgtaaatcccacactgcagggaagacctcgcacgtaactcacgttgtgcattgtcaaagtgttacattcgggcagcagcggatgatcctccagtatggtagcgcgggtttctgtctcaaaaggaggtagacgatccctactgtacggagtgcgccgagacaaccgagatcgtgttggtcgtagtgtcatgccaaatggaacgccggacgtagtcatatttcctgaagcaaaaccaggtgcgggcgtgacaaacagatctgcgtctccggtctcgccgcttagatcgctctgtgtagtagttgtagtatatccactctctcaaagcatccaggcgccccctggcttcgggttctatgtaaactccttcatgcgccgctgccctgataacatccaccaccgcagaataagccacacccagccaacctacacattcgttctgcgagtcacacacgggaggagcgggaagagctggaagaaccatgtttttttttttattccaaaagattatccaaaacctcaaaatgaagatctattaagtgaacgcgctcccctccggtggcgtggtcaaactctacagccaaagaacagataatggcatttgtaagatgttgcacaatggcttccaaaaggcaaacggccctcacgtccaagtggacgtaaaggctaaacccttcagggtgaatctcctctataaacattccagcaccttcaaccatgcccaaataattctcatctcgccaccttctcaatatatctctaagcaaatcccgaatattaagtccggccattgtaaaaatctgctccagagcgccctccaccttcagcctcaagcagcgaatcatgattgcaaaaattcaggttcctcacagacctgtataagattcaaaagcggaacattaacaaaaataccgcgatcccgtaggtcccttcgcagggccagctgaacataatcgtgcaggtctgcacggaccagcgcggccacttccccgccaggaaccatgacaaaagaacccacactgattatgacacgcatactcggagctatgctaaccagcgtagccccgatgtaagcttgttgcatgggcggcgatataaaatgcaaggtgctgctcaaaaaatcaggcaaagcctcgcgcaaaaaagaaagcacatcgtagtcatgctcatgcagataaaggcaggtaagctccggaaccaccacagaaaaagacaccatttttctctcaaacatgtctgcgggtttctgcataaacacaaaataaaataacaaaaaaacatttaaacattagaagcctgtcttacaacaggaaaaacaacccttataagcataagacggactacggccatgccggcgtgaccgtaaaaaaactggtcaccgtgattaaaaagcaccaccgacagctcctcggtcatgtccggagtcataatgtaagactcggtaaacacatcaggttgattcacatcggtcagtgctaaaaagcgaccgaaatagcccgggggaatacatacccgcaggcgtagagacaacattacagcccccataggaggtataacaaaattaataggagagaaaaacacataaacacctgaaaaaccctcctgcctaggcaaaatagcaccctcccgctccagaacaacatacagcgcttccacagcggcagccataacagtcagccttaccagtaaaaaagaaaacctattaaaaaaacaccactcgacacggcaccagctcaatcagtcacagtgtaaaaaagggccaagtgcagagcgagtatatataggactaaaaaatgacgtaacggttaaagtccacaaaaaacacccagaaaaccgcacgcgaacctacgcccagaaacgaaagccaaaaaacccacaacttcctcaaatcgtcacttccgttttcccacgttacgtcacttcccattttaagaaaactacaattcccaacacatacaagttactccgcccttaattaaatcggatccgatatctagatgtattcgcgaggtaccgagctcgaattctctggccgtcgttttacaacgtcgtgactgggaaaaccctggcgttacccaacttaatcgccttgcagcacatccccctttcgccagctggcgtaatagcgaagaggcccgcaccgatcgcccttcccaacagttgcgcagcctgaatggcgaatggcgcctgatgcggtattttctccttacgcatctgtgcggtatttcacaccgcatatggtgcactctcagtacaatctgctctgatgccgcatagttaagccagccccgacacccgccaacacccgctgacgcgccctgacgggcttgtctgctcccggcatccgcttacagacaagctgtgaccgtctccgggagctgcatgtgtcagaggttttcaccgtcatcaccgaaacgcgcga

SEQ ID NO: 47 - DNA, 14977 bp, synthetic construct
  source 1..14977: mol_type = other DNA
tgcagctctggcccgtgtctcaaaatctctgatgttacattgcacaagataaaaatatatcatcatgaacaataaaactgtctgcttacataaacagtaatacaaggggtgttatgagccatattcaacgggaaacgtcgaggccgcgattaaattccaacatggatgctgatttatatgggtataaatgggctcgcgataatgtcgggcaatcaggtgcgacaatctatcgcttgtatgggaagcccgatgcgccagagttgtttctgaaacatggcaaaggtagcgttgccaatgatgttacagatgagatggtcagactaaactggctgacggaatttatgcctcttccgaccatcaagcattttatccgtactcctgatgatgcatggttactcaccactgcgatccccggaaaaacagcattccaggtattagaagaatatcctgattcaggtgaaaatattgttgatgcgctggcagtgttcctgcgccggttgcattcgattcctgtttgtaattgtccttttaacagcgatcgcgtatttcgtctcgctcaggcgcaatcacgaatgaataacggtttggttgatgcgagtgattttgatgacgagcgtaatggctggcctgttgaacaagtctggaaagaaatgcataaacttttgccattctcaccggattcagtcgtcactcatggtgatttctcacttgataaccttatttttgacgaggggaaattaataggttgtattgatgttggacgagtcggaatcgcagaccgataccaggatcttgccatcctatggaactgcctcggtgagttttctccttcattacagaaacggctttttcaaaaatatggtattgataatcctgatatgaataaattgcagtttcatttgatgctcgatgagtttttctaatcagaattggttaattggttgtaacattattcagattgggcttgatttaaaacttcatttttaatttaaaaggatctaggtgaagatcctttttgataatctcatgaccaaaatcccttaacgtgagttttcgttccactgagcgtcagaccccgtagaaaagatcaaaggatcttcttgagatcctttttttctgcgcgtaatctgctgcttgcaaacaaaaaaaccaccgctaccagcggtggtttgtttgccggatcaagagctaccaactctttttccgaaggtaactggcttcagcagagcgcagataccaaatactgttcttctagtgtagccgtagttaggccaccacttcaagaactctgtagcaccgcctacatacctcgctctgctaatcctgttaccagtggctgctgccagtggcgataagtcgtgtcttaccgggttggactcaagacgatagttaccggataaggcgcagcggtcgggctgaacggggggttcgtgcacacagcccagcttggagcgaacgacctacaccgaactgagatacctacagcgtgagctatgagaaagcgccacgcttcccgaagggagaaaggcggacaggtatccggtaagcggcagggtcggaacaggagagcgcacgagggagcttccagggggaaacgcctggtatctttatagtcctgtcgggtttcgccacctctgacttgagcgtcgatttttgtgatgctcgtcaggggggcggagcctatggaaaaacgccagcaacgcggcctttttacggttcctggccttttgctggccttttgctcacatgttctttcctgcgttatcccctgattctgtggataaccgtattaccgcctttgagtgagctgataccgctcgccgcagccgaacgaccgagcgcagcgagtcagtgagcgaggaagcggaagagcgcccaatacgcaaaccgcctctccccgcgcgttggccgattcattaatgcagctggcacgacaggtttcccgactggaaagcgggcagtgagcgcaacgcaattaatgtgagttagctcactcattaggcaccccaggctttacactttatgcttccggctcgtatgttgtgtggaattgtgagcggataacaatttcacacaggaaacagctatgaccatgattacaccaagcttgcatgcaggcctctgcagtcgaccagaagcaccatgtccttgggtccggcctgctgaatgcgcaggcggtcggccatgccccaggcttcgttttgacatcggcgcaggtctttgtagtagtcttgcatgagcctttctaccggcacttcttcttctccttcctcttgtcctgcatctcttgcatctatcgctgcggcggcggcggagtttggccgtaggtggcgccctcttcctcccatgcgtgtgaccccgaagcccctcatcggctgaagcagggctaggtcggcgacaacgcgctcggctaatatggcctgctgcacctgcgtgagggtagactggaagtcatccatgtccacaaagcggtggtatgcgcccgtgttgatggtgtaagtgcagttggccataacggaccagttaacggtctggtgacccggctgcgagagctcggtgtacctgagacgcgagtaagccctcgagtcaaatacgtagtcgttgcaagtccgcaccaggtactggtatcccaccaaaaagtgcggcggcggctggcggtagaggggccagcgtagggtggccggggctccgggggcgagatcttccaacataaggcgatgatatccgtagatgtacctggacatccaggtgatgccggcggcggtggtggaggcgcgcggaaagtcgcggacgcggttccagatgttgcgcagcggcaaaaagtgctccatggtcgggacgctctggccggtcaggcgcgcgcaatcgttgacgctctagcgtgcaaaaggagagcctgtaagcgggcactcttccgtggtctggtggataaattcgcaagggtatcatggcggacgaccggggttcgagccccgtatccggccgtccgccgtgatccatgcggttaccgcccgcgtgtcgaacccaggtgtgcgacgtcagacaacgggggagtgctccttttggcttccttccaggcgcggcggctgctgcgctagcttttttggccactggccgcgcgcagcgtaagcggttaggctggaaagcgaaagcattaagtggctcgctccctgtagccggagggttattttccaagggttgagtcgcgggacccccggttcgagtctcggaccgagactgggggcgtacactggatggcctttgcctggaacccgcactcaaaaacatgctacctctttgagccctttggcttttctgaccagcgactcaagcaggtttaccagtttgagtacgagtcactcctgcgccgtagcgccattgcttcttcccccgaccgctgtataacgctggaaaagtccacccaaagcgtacaggggcccaactcggccgcctgtggactattctgctgcatgtttctccacgcctttgccaactggccccaaactcccatggatcacaaccccaccatgaaccttattaccggggtacccaactccatgctcaacagtccccaggtacagcccaccctgcgtcgcaaccaggaacagctctacagcttcctggagcgccactcgccctacttccgcagccacagtgcgcagattaggagcgccacttctttttgtcacttgaaaaacatgtaaaaataatgtactagagacactttcaataaaggcaaatgcttttatttgtacactctcgggtgattatttacccccacccttgccgtctgcgccgtttaaaaatcaaaggggttctgccgcgcatcgctatgcgccactggcagggacacgttgcgatactggtgtttagtgctccacttaaactcaggcacaaccatccgcggcagctcggtgaagttttcactccacaggctgcgcaccatcaccaacgcgtttagcaggtcgggcgccgatatcttgaagtcgcagttggggcctccgccctgcgcgcgcgagttgcgatacacagggttgcagcactggaacactatcagcgccgggtggtgcacgctggccagcacgctcttgtcggagatcagatccgcgtccaggtcctccgcgttgctcagggcgaacggagtcaactttggtagctgccttcccaaaaagggcgcgtgcccaggctttgagttgcactcgcaccgtagtggcatcaaaaggtgaccgtgcccggtctgggcgttaggatacagcgcctgcataaaagccttgatctgcttaaaagccacctgagcctttgcgccttcagagaagaacatgccgcaagacttgccggaaaactgattggccggacaggccgcgtcgtgcacgcagcaccttgcgtcggtgttggagatctgcaccacatttcggccccaccggttcttcacgatcttggccttgctagactgctccttcagcgcgcgctgcccgttttcgctcgtcacatccatttcaatcacgtgctccttatttatcataatgcttccgtgtagacacttaagctcgccttcgatctcagcgcagcggtgcagccacaacgcgcagcccgtgggctcgtgatgcttgtaggtcacctctgcaaacgactgcaggtacgcctgcaggaatcgccccatcatcgtcacaaaggtcttgttgctggtgaaggtcagctgcaacccgcggtgctcctcgttcagccaggtcttgcatacggccgccagagcttccacttggtcaggcagtagtttgaagttcgcctttagatcgttatccacgtggtacttgtccatcagcgcgcgcgcagcctccatgcccttctcccacgcagacacgatcggcacactcagcgggttcatcaccgtaatttcactttccgcttcgctgggctcttcctcttcctcttgcgtccgcataccacgcgccactgggtcgtcttcattcagccgccgcactgtgcgcttacctcctttgccatgcttgattagcaccggtgggttgctgaaacccaccatttgtagcgccacatcttctctttcttcctcgctgtccacgattacctctggtgatggcgggcgctcgggcttgggagaagggcgcttctttttcttcttgggcgcaatggccaaatccgccgccgaggtcgatggccgcgggctgggtgtgcgcggcaccagcgcgtcttgtgatgagtcttcctcgtcctcggactcgatacgccgcctcatccgcttttttgggggcgcccggggaggcggcggcgacggggacggggacgacacgtcctccatggttgggggacgtcgcgccgcaccgcgtccgcgctcgggggtggtttcgcgctgctcctcttcccgactggccatttccttctcctataggcagaaaaagatccacaaaagcgaagatcagcttcggcgcacgctggaagacgcggaggctctcttcagtaaatactgcgcgctgactcttaaggactagtttcgcgccctttctcaaatttaagcgcgaaaactacgtcatctccagcggccacacccggcgccagcacctgttgtcagcgccattggcgcgcccgcccgccgcgcgcttcgctttttatagggccgccgccgccgccgcctcgccataaaaggaaactttcggagcgcgccgctctgattggctgccgccgcacctctccgcctcgccccgccccgcccctcgccccgccccgccccgcctggcgcgcgccccccccccccccccgcccccatcgctgcacaaaataattaaaaaataaataaatacaaaattgggggtggggaggggggggagatggggagagtgaagcagaacgtggggctcacctcgaggccggccgaatatcttcatttaaatgggcagagcgcacatcgcccacagtccccgagaagttggggggaggggtcggcaattgaaccggtgcctagagaaggtggcgcggggtaaactgggaaagtgatgtcgtgtactggctccgcctttttcccgagggtgggggagaaccgtatataagtgcagtagtcgccgtgaacgttctttttcgcaacgggtttgccgccagaacacagcaccgcgggcccgatccaccggtactgttggtaaagccaccatgttttccggtggcggcggcccgctgtcccccggaggaaagtcggcggccagggcggcgtccgggttttttgcgcccgccggccctcgcggagccagccggggacccccgccttgtttgaggcaaaacttttacaacccctacctcgccccagtcgggacgcaacagaagccgaccgggccaacccagcgccatacgtactatagcgaatgcgatgaatttcgattcatcgccccgcgggtgctggacgaggatgcccccccggagaagcgcgccggggtgcacgacggtcacctcaagcgcgcccccaaggtgtactgcgggggggacgagcgcgacgtcctccgcgtcgggtcgggcggcttctggccgcggcgctcgcgcctgtggggcggcgtggaccacgccccggcggggttcaaccccaccgtcaccgtctttcacgtgtacgacatcctggagaacgtggagcacgcgtacggcatgcgcgcggcccagttccacgcgcggtttatggacgccatcacaccgacggggaccgtcatcacgctcctgggcctgactccggaaggccaccgggtggccgttcacgtttacggcacgcggcagtacttttacatgaacaaggaggaggtcgacaggcacctacaatgccgcgccccacgagatctctgcgagcgcatggccgcggccctgcgcgagtccccgggcgcgtcgttccgcggcatctccgcggaccacttcgaggcggaggtggtggagcgcaccgacgtgtactactacgagacgcgccccgctctgttttaccgcgtctacgtccgaagcgggcgcgtgctgtcgtacctgtgcgacaacttctgcccggccatcaagaagtacgagggtggggtcgacgccaccacccggttcatcctggacaaccccgggttcgtcaccttcggctggtaccgtctcaaaccgggccggaacaacacgctagcccagccgcgggccccgatggccttcgggacatccagcgacgtcgagtttaactgtacggcggacaacctggccatcgaggggggcatgagcgacctaccggcatacaagctcatgtgcttcgatatcgaatgcaaggcggggggggaggacgagctggcctttccggtggccgggcacccggaggacctggtcatccagatatcctgtctgctctacgacctgtccaccaccgccctggagcacgtcctcctgttttcgctcggttcctgcgacctccccgaatcccacctgaacgagctggcggccaggggcctgcccacgcccgtggttctggaattcgacagcgaattcgagatgctgttggccttcatgacccttgtgaaacagtacggccccgagttcgtgaccgggtacaacatcatcaacttcgactggcccttcttgctggccaagctgacggacatttacaaggtccccctggacgggtacggccgcatgaacggccggggcgtgtttcgcgtgtgggacataggccagagccacttccagaagcgcagcaagataaaggtgaacggcatggtgaacatcgacatgtacgggattataaccgacaagatcaagctctcgagctacaagctcaacgccgtggccgaagccgtcctgaaggacaagaagaaggacctgagctatcgcgacatccccgcctactacgccgccgggcccgcgcaacgcggggtgatcggcgagtactgcatacaggattccctgctggtgggccagctgttttttaagtttttgccccatctggagctctcggccgtcgcgcgcttggcgggtattaacatcacccgcaccatctacgacggccagcagatccgcgtctttacgtgcctgctgcgcctggccgaccagaagggctttattctgccggacacccaggggcgatttaggggcgccgggggggaggcgcccaagcgtccggccgcagcccgggaggacgaggagcggccagaggaggagggggaggacgaggacgaacgcgaggagggcgggggcgagcgggagccggagggcgcgcgggagaccgccggcaggcacgtggggtaccagggggccagggtccttgaccccacttccgggtttcacgtgaaccccgtggtggtgttcgactttgccagcctgtaccccagcatcatccaggcccacaacctgtgcttcagcacgctctccctgagggccgacgcagtggcgcacctggaggcgggcaaggactacctggagatcgaggtgggggggcgacggctgttcttcgtcaaggctcacgtgcgagagagcctcctcagcatcctcctgcgggactggctcgccatgcgaaagcagatccgctcgcggattccccagagcagccccgaggaggccgtgctcctggacaagcagcaggccgccatcaaggtcgtgtgtaactcggtgtacgggttcacgggagtgcagcacggactcctgccgtgcctgcacgttgccgcgacggtgacgaccatcggccgcgagatgctgctcgcgacccgcgagtacgtccacgcgcgctgggcggccttcgaacagctcctggccgatttcccggaggcggccgacatgcgcgcccccgggccctattccatgcgcatcatctacggggacacggactccatctttgtgctgtgccgcggcctcacggccgccgggctgacggccgtgggcgacaagatggcgagccacatctcgcgcgcgctgtttctgccccccatcaaactcgagtgcgaaaagacgttcaccaagctgctgctgatcgccaagaaaaagtacatcggcgtcatctacgggggtaagatgctcatcaagggcgtggatctggtgcgcaaaaacaactgcgcgtttatcaaccgcacctccagggccctggtcgacctgctgttttacgacgataccgtctccggagcggccgccgcgttagccgagcgccccgcggaggagtggctggcgcgacccctgcccgagggactgcaggcgttcggggccgtcctcgtagacgcccatcggcgcatcaccgacccggagagggacatccaggactttgtcctcaccgccgaactgagcagacacccgcgcgcgtacaccaacaagcgcctggcccacctgacggtgtattacaagctcatggcccgccgcgcgcaggtcccgtccatcaaggaccggatcccgtacgtgatcgtggcccagacccgcgaggtagaggagacggtcgcgcggctggccgccctccgcgagctagacgccgccgccccaggggacgagcccgccccccccgcggccctgccctccccggccaagcgcccccgggagacgccgtcgcctgccgaccccccgggaggcgcgtccaagccccgcaagctgctggtgtccgagctggccgaggatcccgcatacgccattgcccacggcgtcgccctgaacacggactattacttctcccacctgttgggggcggcgtgcgtgacattcaaggccctgtttgggaataacgccaagatcaccgagagtctgttaaaaaggtttattcccgaagtgtggcaccccccggacgacgtggccgcgcggctccggaccgcagggttcggggcggtgggtgccggcgctacggcggaggaaactcgtcgaatgttgcatagagcctttgatactctagcagaattcggcagtggagcaacaaacttctctctgctgaaacaagccggagatgtcgaagagaatcctggaccgacggattcccctggcggtgtggcccccgcctcccccgtggaggacgcgtcggacgcgtccctcgggcagccggaggagggggcgccctgccaggtggtcctgcagggcgccgaacttaatggaatcctacaggcgtttgccccgctgcgcacgagccttctggactcgcttctggttatgggcgaccggggcatccttatccataacacgatctttggggagcaggtgttcctgcccctggaacactcgcaattcagtcggtatcgctggcgcggacccacggcggcgttcctgtctctcgtggaccagaagcgctccctcctgagcgtgtttcgcgccaaccagtacccggacctacgtcgggtggagttggcgatcacgggccaggccccgtttcgcacgctggttcagcgcatatggacgacgacgtccgacggcgaggccgttgagctagccagcgagacgctgatgaagcgcgaactgacgagctttgtggtgctggttccccagggaacccccgacgttcagttgcgcctgacgaggccgcagctcaccaaggtccttaacgcgaccggggccgatagtgccacgcccaccacgttcgagctcggggttaacggcaaattttccgtgttcaccacgagtacctgcgtcacctttgctgcccgcgaggagggcgtgtcgtccagcaccagcacccaggtccagatcctgtccaacgcgctcaccaaggcgggccaggcggccgccaacgccaagacggtgtacggggaaaatacccatcgcaccttctctgtggtcgtcgacgattgcagcatgcgggcggtgctccggcgactgcaggtcggcgggggcaccctcaagttcttcctcacgacccccgtccccagtctgtgcgtcaccgccaccggtcccaacgcggtatcggcggtatttctcctgaaaccccagaagatttgcctggactggctgggtcatagccaggggtctccttcagccgggagctcggcctcccgggcctctgggagcgagccaacagacagccaggactccgcgtcggacgcggtcagccacggcgatccggaagacctcgatggcgctgcccgggcgggagaggcgggggccttgcatgcctgtccgatgccgtcgtcgaccacgcgggtcactcccacgaccaagcgggggcgctcggggggcgaggatgcgcgcgcggacacggccctaaagaaacctaagacggggtcgcccaccgcacccccgcccgcagatccagtccccctggacacggaggacgactccgatgcggcggacgggacggcggcccgtcccgccgctccagacgcccggagcggaagccgttacgcgtgttactttcgcgacctcccgaccggagaagcaagccccggcgccttctccgccttccgggggggcccccaaaccccgtatggttttggattcccctgataagatccgactgcaggtagaataaaggaaatttattttcattgcaatagtgtgttggaattttttgtgtctctcagtttaaacgcggccgccgtttgtgttatgtttcaacgtgtttatttttcaattgcagaaaatttcaagtcatttttcattcagtagtatagccccaccaccacatagcttatacagatcaccgtaccttaatcaaactcacagaaccctagtattcaacctgccacctccctcccaacacacagagtacacagtcctttctccccggctggccttaaaaagcatcatatcatgggtaacagacatattcttaggtgttatattccacacggtttcctgtcgagccaaacgctcatcagtgatattaataaactccccgggcagctcacttaagttcatgtcgctgtccagctgctgagccacaggctgctgtccaacttgcggttgcttaacgggcggcgaaggagaagtccacgcctacatgggggtagagtcataatcgtgcatcaggatagggcggtggtgctgcagcagcgcgcgaataaactgctgccgccgccgctccgtcctgcaggaatacaacatggcagtggtctcctcagcgatgattcgcaccgcccgcagcataaggcgccttgtcctccgggcacagcagcgcaccctgatctcacttaaatcagcacagtaactgcagcacagcaccacaatattgttcaaaatcccacagtgcaaggcgctgtatccaaagctcatggcggggaccacagaacccacgtggccatcataccacaagcgcaggtagattaagtggcgacccctcataaacacgctggacataaacattacctcttttggcatgttgtaattcaccacctcccggtaccatataaacctctgattaaacatggcgccatccaccaccatcctaaaccagctggccaaaacctgcccgccggctatacactgcagggaaccgggactggaacaatgacagtggagagcccaggactcgtaaccatggatcatcatgctcgtcatgatatcaatgttggcacaacacaggcacacgtgcatacacttcctcaggattacaagctcctcccgcgttagaaccatatcccagggaacaacccattcctgaatcagcgtaaatcccacactgcagggaagacctcgcacgtaactcacgttgtgcattgtcaaagtgttacattcgggcagcagcggatgatcctccagtatggtagcgcgggtttctgtctcaaaaggaggtagacgatccctactgtacggagtgcgccgagacaaccgagatcgtgttggtcgtagtgtcatgccaaatggaacgccggacgtagtcatatttcctgaagcaaaaccaggtgcgggcgtgacaaacagatctgcgtctccggtctcgccgcttagatcgctctgtgtagtagttgtagtatatccactctctcaaagcatccaggcgccccctggcttcgggttctatgtaaactccttcatgcgccgctgccctgataacatccaccaccgcagaataagccacacccagccaacctacacattcgttctgcgagtcacacacgggaggagcgggaagagctggaagaaccatgtttttttttttattccaaaagattatccaaaacctcaaaatgaagatctattaagtgaacgcgctcccctccggtggcgtggtcaaactctacagccaaagaacagataatggcatttgtaagatgttgcacaatggcttccaaaaggcaaacggccctcacgtccaagtggacgtaaaggctaaacccttcagggtgaatctcctctataaacattccagcaccttcaaccatgcccaaataattctcatctcgccaccttctcaatatatctctaagcaaatcccgaatattaagtccggccattgtaaaaatctgctccagagcgccctccaccttcagcctcaagcagcgaatcatgattgcaaaaattcaggttcctcacagacctgtataagattcaaaagcggaacattaacaaaaataccgcgatcccgtaggtcccttcgcagggccagctgaacataatcgtgcaggtctgcacggaccagcgcggccacttccccgccaggaaccatgacaaaagaacccacactgattatgacacgcatactcggagctatgctaaccagcgtagccccgatgtaagcttgttgcatgggcggcgatataaaatgcaaggtgctgctcaaaaaatcaggcaaagcctcgcgcaaaaaagaaagcacatcgtagtcatgctcatgcagataaaggcaggtaagctccggaaccaccacagaaaaagacaccatttttctctcaaacatgtctgcgggtttctgcataaacacaaaataaaataacaaaaaaacatttaaacattagaagcctgtcttacaacaggaaaaacaacccttataagcataagacggactacggccatgccggcgtgaccgtaaaaaaactggtcaccgtgattaaaaagcaccaccgacagctcctcggtcatgtccggagtcataatgtaagactcggtaaacacatcaggttgattcacatcggtcagtgctaaaaagcgaccgaaatagcccgggggaatacatacccgcaggcgtagagacaacattacagcccccataggaggtataacaaaattaataggagagaaaaacacataaacacctgaaaaaccctcctgcctaggcaaaatagcaccctcccgctccagaacaacatacagcgcttccacagcggcagccataacagtcagccttaccagtaaaaaagaaaacctattaaaaaaacaccactcgacacggcaccagctcaatcagtcacagtgtaaaaaagggccaagtgcagagcgagtatatataggactaaaaaatgacgtaacggttaaagtccacaaaaaacacccagaaaaccgcacgcgaacctacgcccagaaacgaaagccaaaaaacccacaacttcctcaaatcgtcacttccgttttcccacgttacgtcacttcccattttaagaaaactacaattcccaacacatacaagttactccgcccttaattaaatcggatccgatatctagatgtattcgcgaggtaccgagctcgaattctctggccgtcgttttacaacgtcgtgactgggaaaaccctggcgttacccaacttaatcgccttgcagcacatccccctttcgccagctggcgtaatagcgaagaggcccgcaccgatcgcccttcccaacagttgcgcagcctgaatggcgaatggcgcctgatgcggtattttctccttacgcatctgtgcggtatttcacaccgcatatggtgcactctcagtacaatctgctctgatgccgcatagttaagccagccccgacacccgccaacacccgctgacgcgccctgacgggcttgtctgctcccggcatccgcttacagacaagctgtgaccgtctccgggagctgcatgtgtcagaggttttcaccgtcatcaccgaaacgcgcga

SEQ ID NO: 48 - DNA, 15278 bp, synthetic construct
  source 1..15278: mol_type = other DNA
tgcagctctggcccgtgtctcaaaatctctgatgttacattgcacaagataaaaatatatcatcatgaacaataaaactgtctgcttacataaacagtaatacaaggggtgttatgagccatattcaacgggaaacgtcgaggccgcgattaaattccaacatggatgctgatttatatgggtataaatgggctcgcgataatgtcgggcaatcaggtgcgacaatctatcgcttgtatgggaagcccgatgcgccagagttgtttctgaaacatggcaaaggtagcgttgccaatgatgttacagatgagatggtcagactaaactggctgacggaatttatgcctcttccgaccatcaagcattttatccgtactcctgatgatgcatggttactcaccactgcgatccccggaaaaacagcattccaggtattagaagaatatcctgattcaggtgaaaatattgttgatgcgctggcagtgttcctgcgccggttgcattcgattcctgtttgtaattgtccttttaacagcgatcgcgtatttcgtctcgctcaggcgcaatcacgaatgaataacggtttggttgatgcgagtgattttgatgacgagcgtaatggctggcctgttgaacaagtctggaaagaaatgcataaacttttgccattctcaccggattcagtcgtcactcatggtgatttctcacttgataaccttatttttgacgaggggaaattaataggttgtattgatgttggacgagtcggaatcgcagaccgataccaggatcttgccatcctatggaactgcctcggtgagttttctccttcattacagaaacggctttttcaaaaatatggtattgataatcctgatatgaataaattgcagtttcatttgatgctcgatgagtttttctaatcagaattggttaattggttgtaacattattcagattgggcttgatttaaaacttcatttttaatttaaaaggatctaggtgaagatcctttttgataatctcatgaccaaaatcccttaacgtgagttttcgttccactgagcgtcagaccccgtagaaaagatcaaaggatcttcttgagatcctttttttctgcgcgtaatctgctgcttgcaaacaaaaaaaccaccgctaccagcggtggtttgtttgccggatcaagagctaccaactctttttccgaaggtaactggcttcagcagagcgcagataccaaatactgttcttctagtgtagccgtagttaggccaccacttcaagaactctgtagcaccgcctacatacctcgctctgctaatcctgttaccagtggctgctgccagtggcgataagtcgtgtcttaccgggttggactcaagacgatagttaccggataaggcgcagcggtcgggctgaacggggggttcgtgcacacagcccagcttggagcgaacgacctacaccgaactgagatacctacagcgtgagctatgagaaagcgccacgcttcccgaagggagaaaggcggacaggtatccggtaagcggcagggtcggaacaggagagcgcacgagggagcttccagggggaaacgcctggtatctttatagtcctgtcgggtttcgccacctctgacttgagcgtcgatttttgtgatgctcgtcaggggggcggagcctatggaaaaacgccagcaacgcggcctttttacggttcctggccttttgctggccttttgctcacatgttctttcctgcgttatcccctgattctgtggataaccgtattaccgcctttgagtgagctgataccgctcgccgcagccgaacgaccgagcgcagcgagtcagtgagcgaggaagcggaagagcgcccaatacgcaaaccgcctctccccgcgcgttggccgattcattaatgcagctggcacgacaggtttcccgactggaaagcgggcagtgagcgcaacgcaattaatgtgagttagctcactcattaggcaccccaggctttacactttatgcttccggctcgtatgttgtgtggaattgtgagcggataacaatttcacacaggaaacagctatgaccatgattacaccaagcttgcatgcaggcctctgcagtcgaccagaagcaccatgtccttgggtccggcctgctgaatgcgcaggcggtcggccatgccccaggcttcgttttgacatcggcgcaggtctttgtagtagtcttgcatgagcctttctaccggcacttcttcttctccttcctcttgtcctgcatctcttgcatctatcgctgcggcggcggcggagtttggccgtaggtggcgccctcttcctcccatgcgtgtgaccccgaagcccctcatcggctgaagcagggctaggtcggcgacaacgcgctcggctaatatggcctgctgcacctgcgtgagggtagactggaagtcatccatgtccacaaagcggtggtatgcgcccgtgttgatggtgtaagtgcagttggccataacggaccagttaacggtctggtgacccggctgcgagagctcggtgtacctgagacgcgagtaagccctcgagtcaaatacgtagtcgttgcaagtccgcaccaggtactggtatcccaccaaaaagtgcggcggcggctggcggtagaggggccagcgtagggtggccggggctccgggggcgagatcttccaacataaggcgatgatatccgtagatgtacctggacatccaggtgatgccggcggcggtggtggaggcgcgcggaaagtcgcggacgcggttccagatgttgcgcagcggcaaaaagtgctccatggtcgggacgctctggccggtcaggcgcgcgcaatcgttgacgctctagcgtgcaaaaggagagcctgtaagcgggcactcttccgtggtctggtggataaattcgcaagggtatcatggcggacgaccggggttcgagccccgtatccggccgtccgccgtgatccatgcggttaccgcccgcgtgtcgaacccaggtgtgcgacgtcagacaacgggggagtgctccttttggcttccttccaggcgcggcggctgctgcgctagcttttttggccactggccgcgcgcagcgtaagcggttaggctggaaagcgaaagcattaagtggctcgctccctgtagccggagggttattttccaagggttgagtcgcgggacccccggttcgagtctcggaccgagactgggggcgtacactggatggcctttgcctggaacccgcactcaaaaacatgctacctctttgagccctttggcttttctgaccagcgactcaagcaggtttaccagtttgagtacgagtcactcctgcgccgtagcgccattgcttcttcccccgaccgctgtataacgctggaaaagtccacccaaagcgtacaggggcccaactcggccgcctgtggactattctgctgcatgtttctccacgcctttgccaactggccccaaactcccatggatcacaaccccaccatgaaccttattaccggggtacccaactccatgctcaacagtccccaggtacagcccaccctgcgtcgcaaccaggaacagctctacagcttcctggagcgccactcgccctacttccgcagccacagtgcgcagattaggagcgccacttctttttgtcacttgaaaaacatgtaaaaataatgtactagagacactttcaataaaggcaaatgcttttatttgtacactctcgggtgattatttacccccacccttgccgtctgcgccgtttaaaaatcaaaggggttctgccgcgcatcgctatgcgccactggcagggacacgttgcgatactggtgtttagtgctccacttaaactcaggcacaaccatccgcggcagctcggtgaagttttcactccacaggctgcgcaccatcaccaacgcgtttagcaggtcgggcgccgatatcttgaagtcgcagttggggcctccgccctgcgcgcgcgagttgcgatacacagggttgcagcactggaacactatcagcgccgggtggtgcacgctggccagcacgctcttgtcggagatcagatccgcgtccaggtcctccgcgttgctcagggcgaacggagtcaactttggtagctgccttcccaaaaagggcgcgtgcccaggctttgagttgcactcgcaccgtagtggcatcaaaaggtgaccgtgcccggtctgggcgttaggatacagcgcctgcataaaagccttgatctgcttaaaagccacctgagcctttgcgccttcagagaagaacatgccgcaagacttgccggaaaactgattggccggacaggccgcgtcgtgcacgcagcaccttgcgtcggtgttggagatctgcaccacatttcggccccaccggttcttcacgatcttggccttgctagactgctccttcagcgcgcgctgcccgttttcgctcgtcacatccatttcaatcacgtgctccttatttatcataatgcttccgtgtagacacttaagctcgccttcgatctcagcgcagcggtgcagccacaacgcgcagcccgtgggctcgtgatgcttgtaggtcacctctgcaaacgactgcaggtacgcctgcaggaatcgccccatcatcgtcacaaaggtcttgttgctggtgaaggtcagctgcaacccgcggtgctcctcgttcagccaggtcttgcatacggccgccagagcttccacttggtcaggcagtagtttgaagttcgcctttagatcgttatccacgtggtacttgtccatcagcgcgcgcgcagcctccatgcccttctcccacgcagacacgatcggcacactcagcgggttcatcaccgtaatttcactttccgcttcgctgggctcttcctcttcctcttgcgtccgcataccacgcgccactgggtcgtcttcattcagccgccgcactgtgcgcttacctcctttgccatgcttgattagcaccggtgggttgctgaaacccaccatttgtagcgccacatcttctctttcttcctcgctgtccacgattacctctggtgatggcgggcgctcgggcttgggagaagggcgcttctttttcttcttgggcgcaatggccaaatccgccgccgaggtcgatggccgcgggctgggtgtgcgcggcaccagcgcgtcttgtgatgagtcttcctcgtcctcggactcgatacgccgcctcatccgcttttttgggggcgcccggggaggcggcggcgacggggacggggacgacacgtcctccatggttgggggacgtcgcgccgcaccgcgtccgcgctcgggggtggtttcgcgctgctcctcttcccgactggccatttccttctcctataggcagaaaaagatccacaaaagcgaagatcagcttcggcgcacgctggaagacgcggaggctctcttcagtaaatactgcgcgctgactcttaaggactagtttcgcgccctttctcaaatttaagcgcgaaaactacgtcatctccagcggccacacccggcgccagcacctgttgtcagcgccattggcgcgcccgcccgccgcgcgcttcgctttttatagggccgccgccgccgccgcctcgccataaaaggaaactttcggagcgcgccgctctgattggctgccgccgcacctctccgcctcgccccgccccgcccctcgccccgccccgccccgcctggcgcgcgccccccccccccccccgcccccatcgctgcacaaaataattaaaaaataaataaatacaaaattgggggtggggaggggggggagatggggagagtgaagcagaacgtggggctcacctcgaggccggccgaatatcttcatttaaatgtgtgtcagttagggtgtggaaagtccccaggctccccagcaggcagaagtatgcaaagcatgcatctcaattagtcagcaaccaggtgtggaaagtccccaggctccccagcaggcagaagtatgcaaagcatgcatctcaattagtcagcaaccatagtcccgcccctaactccgcccatcccgcccctaactccgcccagttccgcccattctccgccccatggctgactaattttttttatttatgcagaggccgaggccgcctcggcctctgagctattccagaagtagtgaggaggcttttttggaggcctaggcttttgcaaacgccggcgcaccgcgggcccgatccaccggtactgttggtaaagccaccatgttttccggtggcggcggcccgctgtcccccggaggaaagtcggcggccagggcggcgtccgggttttttgcgcccgccggccctcgcggagccagccggggacccccgccttgtttgaggcaaaacttttacaacccctacctcgccccagtcgggacgcaacagaagccgaccgggccaacccagcgccatacgtactatagcgaatgcgatgaatttcgattcatcgccccgcgggtgctggacgaggatgcccccccggagaagcgcgccggggtgcacgacggtcacctcaagcgcgcccccaaggtgtactgcgggggggacgagcgcgacgtcctccgcgtcgggtcgggcggcttctggccgcggcgctcgcgcctgtggggcggcgtggaccacgccccggcggggttcaaccccaccgtcaccgtctttcacgtgtacgacatcctggagaacgtggagcacgcgtacggcatgcgcgcggcccagttccacgcgcggtttatggacgccatcacaccgacggggaccgtcatcacgctcctgggcctgactccggaaggccaccgggtggccgttcacgtttacggcacgcggcagtacttttacatgaacaaggaggaggtcgacaggcacctacaatgccgcgccccacgagatctctgcgagcgcatggccgcggccctgcgcgagtccccgggcgcgtcgttccgcggcatctccgcggaccacttcgaggcggaggtggtggagcgcaccgacgtgtactactacgagacgcgccccgctctgttttaccgcgtctacgtccgaagcgggcgcgtgctgtcgtacctgtgcgacaacttctgcccggccatcaagaagtacgagggtggggtcgacgccaccacccggttcatcctggacaaccccgggttcgtcaccttcggctggtaccgtctcaaaccgggccggaacaacacgctagcccagccgcgggccccgatggccttcgggacatccagcgacgtcgagtttaactgtacggcggacaacctggccatcgaggggggcatgagcgacctaccggcatacaagctcatgtgcttcgatatcgaatgcaaggcggggggggaggacgagctggcctttccggtggccgggcacccggaggacctggtcatccagatatcctgtctgctctacgacctgtccaccaccgccctggagcacgtcctcctgttttcgctcggttcctgcgacctccccgaatcccacctgaacgagctggcggccaggggcctgcccacgcccgtggttctggaattcgacagcgaattcgagatgctgttggccttcatgacccttgtgaaacagtacggccccgagttcgtgaccgggtacaacatcatcaacttcgactggcccttcttgctggccaagctgacggacatttacaaggtccccctggacgggtacggccgcatgaacggccggggcgtgtttcgcgtgtgggacataggccagagccacttccagaagcgcagcaagataaaggtgaacggcatggtgaacatcgacatgtacgggattataaccgacaagatcaagctctcgagctacaagctcaacgccgtggccgaagccgtcctgaaggacaagaagaaggacctgagctatcgcgacatccccgcctactacgccgccgggcccgcgcaacgcggggtgatcggcgagtactgcatacaggattccctgctggtgggccagctgttttttaagtttttgccccatctggagctctcggccgtcgcgcgcttggcgggtattaacatcacccgcaccatctacgacggccagcagatccgcgtctttacgtgcctgctgcgcctggccgaccagaagggctttattctgccggacacccaggggcgatttaggggcgccgggggggaggcgcccaagcgtccggccgcagcccgggaggacgaggagcggccagaggaggagggggaggacgaggacgaacgcgaggagggcgggggcgagcgggagccggagggcgcgcgggagaccgccggcaggcacgtggggtaccagggggccagggtccttgaccccacttccgggtttcacgtgaaccccgtggtggtgttcgactttgccagcctgtaccccagcatcatccaggcccacaacctgtgcttcagcacgctctccctgagggccgacgcagtggcgcacctggaggcgggcaaggactacctggagatcgaggtgggggggcgacggctgttcttcgtcaaggctcacgtgcgagagagcctcctcagcatcctcctgcgggactggctcgccatgcgaaagcagatccgctcgcggattccccagagcagccccgaggaggccgtgctcctggacaagcagcaggccgccatcaaggtcgtgtgtaactcggtgtacgggttcacgggagtgcagcacggactcctgccgtgcctgcacgttgccgcgacggtgacgaccatcggccgcgagatgctgctcgcgacccgcgagtacgtccacgcgcgctgggcggccttcgaacagctcctggccgatttcccggaggcggccgacatgcgcgcccccgggccctattccatgcgcatcatctacggggacacggactccatctttgtgctgtgccgcggcctcacggccgccgggctgacggccgtgggcgacaagatggcgagccacatctcgcgcgcgctgtttctgccccccatcaaactcgagtgcgaaaagacgttcaccaagctgctgctgatcgccaagaaaaagtacatcggcgtcatctacgggggtaagatgctcatcaagggcgtggatctggtgcgcaaaaacaactgcgcgtttatcaaccgcacctccagggccctggtcgacctgctgttttacgacgataccgtctccggagccgccgcggcgttagccgagcgccccgcggaggagtggctggcgcgacccctgcccgagggactgcaggcgttcggggccgtcctcgtagacgcccatcggcgcatcaccgacccggagagggacatccaggactttgtcctcaccgccgaactgagcagacacccgcgcgcgtacaccaacaagcgcctggcccacctgacggtgtattacaagctcatggcccgccgcgcgcaggtcccgtccatcaaggaccggatcccgtacgtgatcgtggcccagacccgcgaggtagaggagacggtcgcgcggctggccgccctccgcgagctagacgccgccgccccaggggacgagcccgccccccccgcggccctgccctccccggccaagcgcccccgggagacgccgtcgcctgccgaccccccgggaggcgcgtccaagccccgcaagctgctggtgtccgagctggccgaggatcccgcatacgccattgcccacggcgtcgccctgaacacggactattacttctcccacctgttgggggcggcgtgcgtgacattcaaggccctgtttgggaataacgccaagatcaccgagagtctgttaaaaaggtttattcccgaagtgtggcaccccccggacgacgtggccgcgcggctccggaccgcagggttcggggcggtgggtgccggcgctacggcggaggaaactcgtcgaatgttgcatagagcctttgatactctagcagaattcggcagtggagcaacaaacttctctctgctgaaacaagccggagatgtcgaagagaatcctggaccgacggattcccctggcggtgtggcccccgcctcccccgtggaggacgcgtcggacgcgtccctcgggcagccggaggagggggcgccctgccaggtggtcctgcagggcgccgaacttaatggaatcctacaggcgtttgccccgctgcgcacgagccttctggactcgcttctggttatgggcgaccggggcatccttatccataacacgatctttggggagcaggtgttcctgcccctggaacactcgcaattcagtcggtatcgctggcgcggacccacggcggcgttcctgtctctcgtggaccagaagcgctccctcctgagcgtgtttcgcgccaaccagtacccggacctacgtcgggtggagttggcgatcacgggccaggccccgtttcgcacgctggttcagcgcatatggacgacgacgtccgacggcgaggccgttgagctagccagcgagacgctgatgaagcgcgaactgacgagctttgtggtgctggttccccagggaacccccgacgttcagttgcgcctgacgaggccgcagctcaccaaggtccttaacgcgaccggggccgatagtgccacgcccaccacgttcgagctcggggttaacggcaaattttccgtgttcaccacgagtacctgcgtcacctttgctgcccgcgaggagggcgtgtcgtccagcaccagcacccaggtccagatcctgtccaacgcgctcaccaaggcgggccaggccgccgcgaacgccaagacggtgtacggggaaaatacccatcgcaccttctctgtggtcgtcgacgattgcagcatgcgggcggtgctccggcgactgcaggtcggcgggggcaccctcaagttcttcctcacgacccccgtccccagtctgtgcgtcaccgccaccggtcccaacgcggtatcggcggtatttctcctgaaaccccagaagatttgcctggactggctgggtcatagccaggggtctccttcagccgggagctcggcctcccgggcctctgggagcgagccaacagacagccaggactccgcgtcggacgcggtcagccacggcgatccggaagacctcgatggcgctgcccgggcgggagaggcgggggccttgcatgcctgtccgatgccgtcgtcgaccacgcgggtcactcccacgaccaagcgggggcgctcggggggcgaggatgcgcgcgcggacacggccctaaagaaacctaagacggggtcgcccaccgcacccccgcccgcagatccagtccccctggacacggaggacgactccgatgcggcggacgggacggcggcccgtcccgccgctccagacgcccggagcggaagccgttacgcgtgttactttcgcgacctcccgaccggagaagcaagccccggcgccttctccgccttccgggggggcccccaaaccccgtatggttttggattcccctgataggatccgactgcaggtagctgtgccttctagttgccagccatctgttgtttgcccctcccccgtgccttccttgaccctggaaggtgccactcccactgtcctttcctaataaaatgaggaaattgcatcgcattgtctgagtaggtgtcattctattctggggggtggggtggggcaggacagcaagggggaggattgggaagacaatagcaggcatgctggggatgcggtgggctctatgggtttaaacatcgatgcggccgccgtttgtgttatgtttcaacgtgtttatttttcaattgcagaaaatttcaagtcatttttcattcagtagtatagccccaccaccacatagcttatacagatcaccgtaccttaatcaaactcacagaaccctagtattcaacctgccacctccctcccaacacacagagtacacagtcctttctccccggctggccttaaaaagcatcatatcatgggtaacagacatattcttaggtgttatattccacacggtttcctgtcgagccaaacgctcatcagtgatattaataaactccccgggcagctcacttaagttcatgtcgctgtccagctgctgagccacaggctgctgtccaacttgcggttgcttaacgggcggcgaaggagaagtccacgcctacatgggggtagagtcataatcgtgcatcaggatagggcggtggtgctgcagcagcgcgcgaataaactgctgccgccgccgctccgtcctgcaggaatacaacatggcagtggtctcctcagcgatgattcgcaccgcccgcagcataaggcgccttgtcctccgggcacagcagcgcaccctgatctcacttaaatcagcacagtaactgcagcacagcaccacaatattgttcaaaatcccacagtgcaaggcgctgtatccaaagctcatggcggggaccacagaacccacgtggccatcataccacaagcgcaggtagattaagtggcgacccctcataaacacgctggacataaacattacctcttttggcatgttgtaattcaccacctcccggtaccatataaacctctgattaaacatggcgccatccaccaccatcctaaaccagctggccaaaacctgcccgccggctatacactgcagggaaccgggactggaacaatgacagtggagagcccaggactcgtaaccatggatcatcatgctcgtcatgatatcaatgttggcacaacacaggcacacgtgcatacacttcctcaggattacaagctcctcccgcgttagaaccatatcccagggaacaacccattcctgaatcagcgtaaatcccacactgcagggaagacctcgcacgtaactcacgttgtgcattgtcaaagtgttacattcgggcagcagcggatgatcctccagtatggtagcgcgggtttctgtctcaaaaggaggtagacgatccctactgtacggagtgcgccgagacaaccgagatcgtgttggtcgtagtgtcatgccaaatggaacgccggacgtagtcatatttcctgaagcaaaaccaggtgcgggcgtgacaaacagatctgcgtctccggtctcgccgcttagatcgctctgtgtagtagttgtagtatatccactctctcaaagcatccaggcgccccctggcttcgggttctatgtaaactccttcatgcgccgctgccctgataacatccaccaccgcagaataagccacacccagccaacctacacattcgttctgcgagtcacacacgggaggagcgggaagagctggaagaaccatgtttttttttttattccaaaagattatccaaaacctcaaaatgaagatctattaagtgaacgcgctcccctccggtggcgtggtcaaactctacagccaaagaacagataatggcatttgtaagatgttgcacaatggcttccaaaaggcaaacggccctcacgtccaagtggacgtaaaggctaaacccttcagggtgaatctcctctataaacattccagcaccttcaaccatgcccaaataattctcatctcgccaccttctcaatatatctctaagcaaatcccgaatattaagtccggccattgtaaaaatctgctccagagcgccctccaccttcagcctcaagcagcgaatcatgattgcaaaaattcaggttcctcacagacctgtataagattcaaaagcggaacattaacaaaaataccgcgatcccgtaggtcccttcgcagggccagctgaacataatcgtgcaggtctgcacggaccagcgcggccacttccccgccaggaaccatgacaaaagaacccacactgattatgacacgcatactcggagctatgctaaccagcgtagccccgatgtaagcttgttgcatgggcggcgatataaaatgcaaggtgctgctcaaaaaatcaggcaaagcctcgcgcaaaaaagaaagcacatcgtagtcatgctcatgcagataaaggcaggtaagctccggaaccaccacagaaaaagacaccatttttctctcaaacatgtctgcgggtttctgcataaacacaaaataaaataacaaaaaaacatttaaacattagaagcctgtcttacaacaggaaaaacaacccttataagcataagacggactacggccatgccggcgtgaccgtaaaaaaactggtcaccgtgattaaaaagcaccaccgacagctcctcggtcatgtccggagtcataatgtaagactcggtaaacacatcaggttgattcacatcggtcagtgctaaaaagcgaccgaaatagcccgggggaatacatacccgcaggcgtagagacaacattacagcccccataggaggtataacaaaattaataggagagaaaaacacataaacacctgaaaaaccctcctgcctaggcaaaatagcaccctcccgctccagaacaacatacagcgcttccacagcggcagccataacagtcagccttaccagtaaaaaagaaaacctattaaaaaaacaccactcgacacggcaccagctcaatcagtcacagtgtaaaaaagggccaagtgcagagcgagtatatataggactaaaaaatgacgtaacggttaaagtccacaaaaaacacccagaaaaccgcacgcgaacctacgcccagaaacgaaagccaaaaaacccacaacttcctcaaatcgtcacttccgttttcccacgttacgtcacttcccattttaagaaaactacaattcccaacacatacaagttactccgcccttaattaaatcggatccgatatctagatgtattcgcgaggtaccgagctcgaattctctggccgtcgttttacaacgtcgtgactgggaaaaccctggcgttacccaacttaatcgccttgcagcacatccccctttcgccagctggcgtaatagcgaagaggcccgcaccgatcgcccttcccaacagttgcgcagcctgaatggcgaatggcgcctgatgcggtattttctccttacgcatctgtgcggtatttcacaccgcatatggtgcactctcagtacaatctgctctgatgccgcatagttaagccagccccgacacccgccaacacccgctgacgcgccctgacgggcttgtctgctcccggcatccgcttacagacaagctgtgaccgtctccgggagctgcatgtgtcagaggttttcaccgtcatcaccgaaacgcgcga

SEQ ID NO: 49 - DNA, 6883 bp, synthetic construct
  source 1..6883: mol_type = other DNA
tgcagctctggcccgtgtctcaaaatctctgatgttacattgcacaagataaaaatatatcatcatgaacaataaaactgtctgcttacataaacagtaatacaaggggtgttatgagccatattcaacgggaaacgtcgaggccgcgattaaattccaacatggatgctgatttatatgggtataaatgggctcgcgataatgtcgggcaatcaggtgcgacaatctatcgcttgtatgggaagcccgatgcgccagagttgtttctgaaacatggcaaaggtagcgttgccaatgatgttacagatgagatggtcagactaaactggctgacggaatttatgcctcttccgaccatcaagcattttatccgtactcctgatgatgcatggttactcaccactgcgatccccggaaaaacagcattccaggtattagaagaatatcctgattcaggtgaaaatattgttgatgcgctggcagtgttcctgcgccggttgcattcgattcctgtttgtaattgtccttttaacagcgatcgcgtatttcgtctcgctcaggcgcaatcacgaatgaataacggtttggttgatgcgagtgattttgatgacgagcgtaatggctggcctgttgaacaagtctggaaagaaatgcataaacttttgccattctcaccggattcagtcgtcactcatggtgatttctcacttgataaccttatttttgacgaggggaaattaataggttgtattgatgttggacgagtcggaatcgcagaccgataccaggatcttgccatcctatggaactgcctcggtgagttttctccttcattacagaaacggctttttcaaaaatatggtattgataatcctgatatgaataaattgcagtttcatttgatgctcgatgagtttttctaatcagaattggttaattggttgtaacattattcagattgggcttgatttaaaacttcatttttaatttaaaaggatctaggtgaagatcctttttgataatctcatgaccaaaatcccttaacgtgagttttcgttccactgagcgtcagaccccgtagaaaagatcaaaggatcttcttgagatcctttttttctgcgcgtaatctgctgcttgcaaacaaaaaaaccaccgctaccagcggtggtttgtttgccggatcaagagctaccaactctttttccgaaggtaactggcttcagcagagcgcagataccaaatactgttcttctagtgtagccgtagttaggccaccacttcaagaactctgtagcaccgcctacatacctcgctctgctaatcctgttaccagtggctgctgccagtggcgataagtcgtgtcttaccgggttggactcaagacgatagttaccggataaggcgcagcggtcgggctgaacggggggttcgtgcacacagcccagcttggagcgaacgacctacaccgaactgagatacctacagcgtgagctatgagaaagcgccacgcttcccgaagggagaaaggcggacaggtatccggtaagcggcagggtcggaacaggagagcgcacgagggagcttccagggggaaacgcctggtatctttatagtcctgtcgggtttcgccacctctgacttgagcgtcgatttttgtgatgctcgtcaggggggcggagcctatggaaaaacgccagcaacgcggcctttttacggttcctggccttttgctggccttttgctcacatgttctttcctgcgttatcccctgattctgtggataaccgtattaccgcctttgagtgagctgataccgctcgccgcagccgaacgaccgagcgcagcgagtcagtgagcgaggaagcggaagagcgcccaatacgcaaaccgcctctccccgcgcgttggccgattcattaatgcagctggcacgacaggtttcccgactggaaagcgggcagtgagcgcaacgcaattaatgtgagttagctcactcattaggcaccccaggctttacactttatgcttccggctcgtatgttgtgtggaattgtgagcggataacaatttcacacaggaaacagctatgaccatgattacaccaagcttgcatgctacgtaatccgtagatgtacctggacatccaggtgatgccggcggcggtggtggaggcgcgcggaaagtcgcggacgcggttccagatgttgcgcagcggcaaaaagtgctccatggtcgggacgctctggccggtgaggcgtgcgcagtcgttgacgctctagaccgtgcaaaaggagagcctgtaagcgggcactcttccgtggtctggtggataaattcgcaagggtatcatggcggacgaccggggttcgaaccccggatccggccgtccgccgtgatccatgcggttaccgcccgcgtgtcgaacccaggtgtgcgacgtcagacaacgggggagcgctccttttggcttccttccaggcgcggcggctgctgcgctagcttttttggccactggccgcgcgcggcgtaagcggttaggctggaaagcgaaagcattaagtggctcgctccctgtagccggagggttattttccaagggttgagtcgcaggacccccggttcgagtctcgggccggccggactgcggcgaacgggggtttgcctccccgtcatgcaagaccccgcttgcaaattcctccggaaacagggacgagccccttttttgcttttcccagatgcatccggtgctgcggcagatgcgcccccctcctcagcagcggcaagagcaagagcagcggcagacatgcagggcaccctccccttctcctaccgcgtcaggaggggcaacatcgatccagacatgataagatacattgatgagtttggacaaaccacaactagaatgcagtgaaaaaaatgctttatttgtgaaatttgtgatgctattgctttatttgtaaccattataagctgcaataaacaagtttgtacactctcgggtgattatttacccccacccttgccgtctgcgccgtttaaaaatcaaaggggttctgccgcgcatcgctatgcgccactggcagggacacgttgcgatactggtgtttagtgctccacttaaactcaggcacaaccatccgcggcagctcggtgaagttttcactccacaggctgcgcaccatcaccaacgcgtttagcaggtcgggcgccgatatcttgaagtcgcagttggggcctccgccctgcgcgcgcgagttgcgatacacagggttgcagcactggaacactatcagcgccgggtggtgcacgctggccagcacgctcttgtcggagatcagatccgcgtccaggtcctccgcgttgctcagggcgaacggagtcaactttggtagctgccttcccaaaaagggcgcgtgcccaggctttgagttgcactcgcaccgtagtggcatcaaaaggtgaccgtgcccggtctgggcgttaggatacagcgcctgcataaaagccttgatctgcttaaaagccacctgagcctttgcgccttcagagaagaacatgccgcaagacttgccggaaaactgattggccggacaggccgcgtcgtgcacgcagcaccttgcgtcggtgttggagatctgcaccacatttcggccccaccggttcttcacgatcttggccttgctagactgctccttcagcgcgcgctgcccgttttcgctcgtcacatccatttcaatcacgtgctccttatttatcataatgcttccgtgtagacacttaagctcgccttcgatctcagcgcagcggtgcagccacaacgcgcagcccgtgggctcgtgatgcttgtaggtcacctctgcaaacgactgcaggtacgcctgcaggaatcgccccatcatcgtcacaaaggtcttgttgctggtgaaggtcagctgcaacccgcggtgctcctcgttcagccaggtcttgcatacggccgccagagcttccacttggtcaggcagtagtttgaagttcgcctttagatcgttatccacgtggtacttgtccatcagcgcgcgcgcagcctccatgcccttctcccacgcagacacgatcggcacactcagcgggttcatcaccgtaatttcactttccgcttcgctgggctcttcctcttcctcttgcgtccgcataccacgcgccactgggtcgtcttcattcagccgccgcactgtgcgcttacctcctttgccatgcttgattagcaccggtgggttgctgaaacccaccatttgtagcgccacatcttctctttcttcctcgctgtccacgattacctctggtgatggcgggcgctcgggcttgggagaagggcgcttctttttcttcttgggcgcaatggccaaatccgccgccgaggtcgatggccgcgggctgggtgtgcgcggcaccagcgcgtcttgtgatgagtcttcctcgtcctcggactcgatacgccgcctcatccgcttttttgggggcgcccggggaggcggcggcgacggggacggggacgacacgtcctccatggttgggggacgtcgcgccgcaccgcgtccgcgctcgggggtggtttcgcgctgctcctcttcccgactggccatggtggcttccttctcctataggcagggcgcgcccgcccgccgcgcgcttcgctttttatagggccgccgccgccgccgcctcgccataaaaggaaactttcggagcgcgccgctctgattggctgccgccgcacctctccgcctcgccccgccccgcccctcgccccgccccgccccgcctggcgcgcgccccccccccccccccgcccccatcgctgcacaaaataattaaaaaataaataaatacaaaattgggggtggggaggggggggagatggggagagtgaagcagaacgtggggctcacctcgaggccggccgaatatcttcatttaaatgtttaaacatcgatgcggccgcaacttgtttattgcagcttataatggttacaaataaagcaatagcatcacaaatttcacaaataaagcatttttttcactgcattctagttgtggtttgtccaaactcatcaatgtatcttagcttaacgggcggcgaaggagaagtccacgcctacatgggggtagagtcataatcgtgcatcaggatagggcggtggtgctgcagcagcgcgcgaataaactgctgccgccgccgctccgtcctgcaggaatacaacatggcagtggtctcctcagcgatgattcgcaccgcccgcagcataaggcgccttgtcctccgggcacagcagcgcaccctgatctcacttaaatcagcacagtaactgcagcacagcaccacaatattgttcaaaatcccacagtgcaaggcgctgtatccaaagctcatggcggggaccacagaacccacgtggccatcataccacaagcgcaggtagattaagtggcgacccctcataaacacgctggacataaacattacctcttttggcatgttgtaattcaccacctcccggtaccatataaacctctgattaaacatggcgccatccaccaccatcctaaaccagctggccaaaacctgcccgccggctatacactgcagggaaccgggactggaacaatgacagtggagagcccaggactcgtaaccatggatcatcatgctcgtcatgatatcaatgttggcacaacacaggcacacgtgcatacacttcctcaggattacaagctcctcccgcgttagaaccatatcccagggaacaacccattcctgaatcagcgtaaatcccacactgcagggaagacctcgcacgtaactcacgttgtgcattgtcaaagtgttacattcgggcagcagcggatgatcctccagtatggtagcgcgggtttctgtctcaaaaggaggtagacgatccctactgtacggagtgcgccgagacaaccgagatcgtgttggtcgtagtgtcatgccaaatggaacgccggacgtagtcatatttcctgaagcaaaaccaggtgcgggcgtgacaaacagatctgcgtctccggtctcgccgcttagatcgctctgtgtagtagttgtagtatatccactctctcaaagcatccaggcgccccctggcttcgggttctatgtaaactccttcatgcgccgctgccctgataacatccaccaccgcagaataagccacacccagccaacctacacattcgttctgcgagtcacacacgggaggagcgggaagagctggaagaaccatggtggcatttgcaaaagcctaggcctccaaaaaagcctcctcactacttctggaatagctcagaggccgaggcggcctcggcctctgcataaataaaaaaaattagtcagccatggggcggagaatgggcggaactgggcggagttaggggcgggatgggcggagttaggggcgggactatggttgctgactaattgagatgcatgctttgcatacttctgcctgctggggagcctggggactttccacacctggttgctgactaattgagatgcatgctttgcatacttctgcctgctggggagcctggggactttccacaccctaactgacacacacgttacgtcacttcccattttaagaaaactacaattcccaacacatacaagttactccgcccttaattaacatatggtgcactctcagtacaatctgctctgatgccgcatagttaagccagccccgacacccgccaacacccgctgacgcgccctgacgggcttgtctgctcccggcatccgcttacagacaagctgtgaccgtctccgggagctgcatgtgtcagaggttttcaccgtcatcaccgaaacgcgcga

SEQ ID NO: 50 - DNA, 122 bp, synthetic construct
  source 1..122: mol_type = other DNA
aacttgtttattgcagcttataatggttacaaataaagcaatagcatcacaaatttcacaaataaagcatttttttcactgcattctagttgtggtttgtccaaactcatcaatgtatctta

SEQ ID NO: 51 - DNA, 330 bp, synthetic construct
  source 1..330: mol_type = other DNA
gtgtgtcagttagggtgtggaaagtccccaggctccccagcaggcagaagtatgcaaagcatgcatctcaattagtcagcaaccaggtgtggaaagtccccaggctccccagcaggcagaagtatgcaaagcatgcatctcaattagtcagcaaccatagtcccgcccctaactccgcccatcccgcccctaactccgcccagttccgcccattctccgccccatggctgactaattttttttatttatgcagaggccgaggccgcctcggcctctgagctattccagaagtagtgaggaggcttttttggaggcctaggcttttgcaaa

SEQ ID NO: 52 - DNA, 225 bp, synthetic construct
  source 1..225: mol_type = other DNA
ctgtgccttctagttgccagccatctgttgtttgcccctcccccgtgccttccttgaccctggaaggtgccactcccactgtcctttcctaataaaatgaggaaattgcatcgcattgtctgagtaggtgtcattctattctggggggtggggtggggcaggacagcaagggggaggattgggaagacaatagcaggcatgctggggatgcggtgggctctatgg

SEQ ID NO: 53 - DNA, 387 bp, synthetic construct
  source 1..387: mol_type = other DNA
taccgacggcgacaccttcgcgacatacaacaagacctcgccctcccacgataaaacggatccgtcctcccaaaaagtccacaaatacacaaaaagagaggataattaaaacaatatggaggatacccccgacattacaacagagatgcggacgcccatacataagggggcccgataaagccagcgaaaaatcgtgactggctacacttagttggactacacaaatggctcagaatgtaatactgaggcctgtactggctcctcgacagccaccacgaaaaattagtgccactggtcaaaaaaatgccagtgcggccgtaccggcatcaggcagaatacgaatattcccaacaaaaaggacaacattctgtccgaagattacaaatt

SEQ ID NO: 54 - DNA, 387 bp, synthetic construct
  source 1..387: mol_type = other DNA
atggctgccgctgtggaagcgctgtatgttgttctggagcgggagggtgctattttgcctaggcaggagggtttttcaggtgtttatgtgtttttctctcctattaattttgttatacctcctatgggggctgtaatgttgtctctacgcctgcgggtatgtattcccccgggctatttcggtcgctttttagcactgaccgatgtgaatcaacctgatgtgtttaccgagtcttacattatgactccggacatgaccgaggagctgtcggtggtgctttttaatcacggtgaccagtttttttacggtcacgccggcatggccgtagtccgtcttatgcttataagggttgtttttcctgttgtaagacaggcttctaatgtttaa

SEQ ID NO: 55 - protein, 128 aa, synthetic construct
MAAAVEALYVVLEREGAILPRQEGFSGVYVFFSPINFVIPPMGAVMLSLRLRVCIPPGYFGRFLALTDVNQPDVFTESYIMTPDMTEELSVVLFNHGDQFFYGHAGMAVVRLMLIRVVFPVVRQASNV

SEQ ID NO: 56 - DNA, 411 bp, synthetic construct
  source 1..411: mol_type = other DNA
tacgtctttgggcgtctgtacaaactctctttttaccacagaaaaagacaccaccaaggcctcgaatggacggaaatagacgtactcgtactgatgctacacgaaagaaaaaacgcgctccgaaacggactaaaaaactcgtcgtggaacgtaaaatatagcggcgggtacgttgttcgaatgtagccccgatgcgaccaatcgtatcgaggctcatacgcacagtattagtcacacccaagaaaacagtaccaaggaccgccccttcaccggcgcgaccaggcacgtctggacgtgctaatacaagtcgaccgggacgcttccctggatgccctagcgccataaaaacaattacaaggcgaaaacttagaatatgtccagacactccttggacttaaaaacgttagtact

SEQ ID NO: 57 - DNA, 411 bp, synthetic construct
  source 1..411: mol_type = other DNA
atgcagaaacccgcagacatgtttgagagaaaaatggtgtctttttctgtggtggttccggagcttacctgcctttatctgcatgagcatgactacgatgtgctttcttttttgcgcgaggctttgcctgattttttgagcagcaccttgcattttatatcgccgcccatgcaacaagcttacatcggggctacgctggttagcatagctccgagtatgcgtgtcataatcagtgtgggttcttttgtcatggttcctggcggggaagtggccgcgctggtccgtgcagacctgcacgattatgttcagctggccctgcgaagggacctacgggatcgcggtatttttgttaatgttccgcttttgaatcttatacaggtctgtgaggaacctgaatttttgcaatcatga

SEQ ID NO: 58 - protein, 136 aa, synthetic construct
MQKPADMFERKMVSFSVVVPELTCLYLHEHDYDVLSFLREALPDFLSSTLHFISPPMQQAYIGATLVSIAPSMRVIISVGSFVMVPGGEVAALVRADLHDYVQLALRRDLRDRGIFVNVPLLNLIQVCEEPEFLQS

SEQ ID NO: 59 - DNA, 351 bp, synthetic construct
  source 1..351: mol_type = other DNA
tactaagcgacgaactccgacttccacctcccgcgagacctcgtctaaaaatgttaccggcctgaattataagccctaaacgaatctctatataactcttccaccgctctactcttaataaacccgtaccaacttccacgaccttacaaatatctcctctaagtgggacttcccaaatcggaaatgcaggtgaacctgcactcccggcaaacggaaaaccttcggtaacacgttgtagaatgtttacggtaatagacaagaaaccgacatctcaaactggtgcggtggcctcccctcgcgcaagtgaattatctagaagtaaaactccaaaacctattagaaaaccttatt

SEQ ID NO: 60 - DNA, 351 bp, synthetic construct
  source 1..351: mol_type = other DNA
atgattcgctgcttgaggctgaaggtggagggcgctctggagcagatttttacaatggccggacttaatattcgggatttgcttagagatatattgagaaggtggcgagatgagaattatttgggcatggttgaaggtgctggaatgtttatagaggagattcaccctgaagggtttagcctttacgtccacttggacgtgagggccgtttgccttttggaagccattgtgcaacatcttacaaatgccattatctgttctttggctgtagagtttgaccacgccaccggaggggagcgcgttcacttaatagatcttcattttgaggttttggataatcttttggaataa

SEQ ID NO: 61 - protein, 116 aa, synthetic construct
MIRCLRLKVEGALEQIFTMAGLNIRDLLRDILRRWRDENYLGMVEGAGMFIEEIHPEGFSLYVHLDVRAVCLLEAIVQHLTNAIICSLAVEFDHATGGERVHLIDLHFEVLDNLLE

SEQ ID NO: 62 - DNA, 345 bp, synthetic construct
  source 1..345: mol_type = other DNA
taccaagaaggtcgagaagggcgaggagggcacacactgagcgtcttgcttacacatccaaccgacccacaccgaataagacgccaccacctacaatagtcccgtcgccgcgtacttcctcaaatgtatcttgggcttcggtcccccgcggacctacgaaactctctcacctatatgatgttgatgatgtgtctcgctagattcgccgctctggcctctgcgtctagacaaacagtgcgggcgtggaccaaaacgaagtcctttatactgatgcaggccgcaaggtaaaccgtactgtgatgctggttgtgctagagccaacagagccgcgtgaggcatgtcatc

SEQ ID NO: 63 - DNA, 345 bp, synthetic construct
  source 1..345: mol_type = other DNA
atggttcttccagctcttcccgctcctcccgtgtgtgactcgcagaacgaatgtgtaggttggctgggtgtggcttattctgcggtggtggatgttatcagggcagcggcgcatgaaggagtttacatagaacccgaagccagggggcgcctggatgctttgagagagtggatatactacaactactacacagagcgatctaagcggcgagaccggagacgcagatctgtttgtcacgcccgcacctggttttgcttcaggaaatatgactacgtccggcgttccatttggcatgacactacgaccaacacgatctcggttgtctcggcgcactccgtacagtag

SEQ ID NO: 64 - protein, 114 aa, synthetic construct
MVLPALPAPPVCDSQNECVGWLGVAYSAVVDVIRAAAHEGVYIEPEARGRLDALREWIYYNYYTERSKRRDRRRRSVCHARTWFCFRKYDYVRRSIWHDTTTNTISVVSAHSVQ

SEQ ID NO: 65 - DNA, 885 bp, synthetic construct
  source 1..885: mol_type = other DNA
tactgatgcaggccgcaaggtaaaccgtactgtgatgctggttgtgctagagccaacagagccgcgtgaggcatgtcatccctagcagatggaggaaaactctgtctttgggcgcgatggtatgacctcctagtaggcgacgacgggcttacattgtgaaactgttacgtgttgcactcaatgcacgctccagaagggacgtcacaccctaaatgcgactaagtccttacccaacaagggaccctataccaagattgcgccctcctcgaacattaggactccttcacatacgtgcacacggacacaacacggttgtaactatagtactgctcgtactactaggtaccaatgctcaggacccgagaggtgacagtaacaaggtcagggccaagggacgtcacatatcggccgcccgtccaaaaccggtcgaccaaatcctaccaccacctaccgcggtacaaattagtctccaaatataccatggccctccaccacttaatgttgtacggttttctccattacaaatacaggtcgcacaaatactccccagcggtgaattagatggacgcgaacaccatactaccggtgcacccaagacaccaggggcggtactcgaaacctatgtcgcggaacgtgacaccctaaaacttgttataacaccacgacacgacgtcaatgacacgactaaattcactctagtcccacgcgacgacacgggcctcctgttccgcggaatacgacgcccgccacgcttagtagcgactcctctggtgacggtacaacataaggacgtcctgcctcgccgccgccgtcgtcaaataagcgcgcgacgacgtcgtggtggcgggataggactacgtgctaatactgagatgggggtacatc

SEQ ID NO: 66 - DNA, 885 bp, synthetic construct
  source 1..885: mol_type = other DNA
atgactacgtccggcgttccatttggcatgacactacgaccaacacgatctcggttgtctcggcgcactccgtacagtagggatcgtctacctccttttgagacagaaacccgcgctaccatactggaggatcatccgctgctgcccgaatgtaacactttgacaatgcacaacgtgagttacgtgcgaggtcttccctgcagtgtgggatttacgctgattcaggaatgggttgttccctgggatatggttctaacgcgggaggagcttgtaatcctgaggaagtgtatgcacgtgtgcctgtgttgtgccaacattgatatcatgacgagcatgatgatccatggttacgagtcctgggctctccactgtcattgttccagtcccggttccctgcagtgtatagccggcgggcaggttttggccagctggtttaggatggtggtggatggcgccatgtttaatcagaggtttatatggtaccgggaggtggtgaattacaacatgccaaaagaggtaatgtttatgtccagcgtgtttatgaggggtcgccacttaatctacctgcgcttgtggtatgatggccacgtgggttctgtggtccccgccatgagctttggatacagcgccttgcactgtgggattttgaacaatattgtggtgctgtgctgcagttactgtgctgatttaagtgagatcagggtgcgctgctgtgcccggaggacaaggcgccttatgctgcgggcggtgcgaatcatcgctgaggagaccactgccatgttgtattcctgcaggacggagcggcggcggcagcagtttattcgcgcgctgctgcagcaccaccgccctatcctgatgcacgattatgactctacccccatgtag

SEQ ID NO: 67 - protein, 294 aa, synthetic construct
MTTSGVPFGMTLRPTRSRLSRRTPYSRDRLPPFETETRATILEDHPLLPECNTLTMHNVSYVRGLPCSVGFTLIQEWVVPWDMVLTREELVILRKCMHVCLCCANIDIMTSMMIHGYESWALHCHCSSPGSLQCIAGGQVLASWFRMVVDGAMFNQRFIWYREVVNYNMPKEVMFMSSVFMRGRHLIYLRLWYDGHVGSVVPAMSFGYSALHCGILNNIVVLCCSYCADLSEIRVRCCARRTRRLMLRAVRIIAEETTAMLYSCRTERRRQQFIRALLQHHRPILMHDYDSTPM

SEQ ID NO: 68 - DNA, 1164 bp, synthetic construct
  source 1..1164: mol_type = other DNA
atgactacgtccggcgttccatttggcatgacactacgaccaacacgatctcggttgtctcggcgcactccgtacagtagggatcgtctacctccttttgagacagaaacccgcgctaccatactggaggatcatccgctgctgcccgaatgtaacactttgacaatgcacaacgtgagttacgtgcgaggtcttccctgcagtgtgggatttacgctgattcaggaatgggttgttccctgggatatggttctaacgcgggaggagcttgtaatcctgaggaagtgtatgcacgtgtgcctgtgttgtgccaacattgatatcatgacgagcatgatgatccatggttacgagtcctgggctctccactgtcattgttccagtcccggttccctgcagtgtatagccggcgggcaggttttggccagctggtttaggatggtggtggatggcgccatgtttaatcagaggtttatatggtaccgggaggtggtgaattacaacatgccaaaagaggtaatgtttatgtccagcgtgtttatgaggggtcgccacttaatctacctgcgcttgtggtatgatggccacgtgggttctgtggtccccgccatgagctttggatacagcgccttgcactgtgggattttgaacaatattgtggtgctgtgctgcagttactgtgctgatttaagtgagatcagggtgcgctgctgtgcccggaggacaaggcgccttatgctgcgggcggtgcgaatcatcgctgaggagaccactgccatgttgtattcctgcaggacggagcggcggcggcagcagtttattcgcgcgctgctgcagcaccaccgccctatcctgatgcacgattatgactctacccccatgtaggcgtggacttctccttcgccgcccgttaagcaaccgcaagttggacagcagcctgtggctcagcagctggacagcgacatgaacttaagtgagctgcccggggagtttattaatatcactgatgagcgtttggctcgacaggaaaccgtgtggaatataacacctaagaatatgtctgttacccatgatatgatgctttttaaggccagccggggagaaaggactgtgtactctgtgtgttgggagggaggtggcaggttgaatactagggttctgtga

SEQ ID NO: 69 - protein, 150 aa, synthetic construct
MTTSGVPFGMTLRPTRSRLSRRTPYSRDRLPPFETETRATILEDHPLLPECNTLTMHNAWTSPSPPVKQPQVGQQPVAQQLDSDMNLSELPGEFINITDERLARQETVWNITPKNMSVTHDMMLFKASRGERTVYSVCWEGGGRLNTRVL

SEQ ID NO: 70 - DNA, 11366 bp, synthetic construct
  source 1..11366: mol_type = other DNA
tgcagctctggcccgtgtctcaaaatctctgatgttacattgcacaagataaaaatatatcatcatgaacaataaaactgtctgcttacataaacagtaatacaaggggtgttatgagccatattcaacgggaaacgtcgaggccgcgattaaattccaacatggatgctgatttatatgggtataaatgggctcgcgataatgtcgggcaatcaggtgcgacaatctatcgcttgtatgggaagcccgatgcgccagagttgtttctgaaacatggcaaaggtagcgttgccaatgatgttacagatgagatggtcagactaaactggctgacggaatttatgcctcttccgaccatcaagcattttatccgtactcctgatgatgcatggttactcaccactgcgatccccggaaaaacagcattccaggtattagaagaatatcctgattcaggtgaaaatattgttgatgcgctggcagtgttcctgcgccggttgcattcgattcctgtttgtaattgtccttttaacagcgatcgcgtatttcgtctcgctcaggcgcaatcacgaatgaataacggtttggttgatgcgagtgattttgatgacgagcgtaatggctggcctgttgaacaagtctggaaagaaatgcataaacttttgccattctcaccggattcagtcgtcactcatggtgatttctcacttgataaccttatttttgacgaggggaaattaataggttgtattgatgttggacgagtcggaatcgcagaccgataccaggatcttgccatcctatggaactgcctcggtgagttttctccttcattacagaaacggctttttcaaaaatatggtattgataatcctgatatgaataaattgcagtttcatttgatgctcgatgagtttttctaatcagaattggttaattggttgtaacattattcagattgggcttgatttaaaacttcatttttaatttaaaaggatctaggtgaagatcctttttgataatctcatgaccaaaatcccttaacgtgagttttcgttccactgagcgtcagaccccgtagaaaagatcaaaggatcttcttgagatcctttttttctgcgcgtaatctgctgcttgcaaacaaaaaaaccaccgctaccagcggtggtttgtttgccggatcaagagctaccaactctttttccgaaggtaactggcttcagcagagcgcagataccaaatactgttcttctagtgtagccgtagttaggccaccacttcaagaactctgtagcaccgcctacatacctcgctctgctaatcctgttaccagtggctgctgccagtggcgataagtcgtgtcttaccgggttggactcaagacgatagttaccggataaggcgcagcggtcgggctgaacggggggttcgtgcacacagcccagcttggagcgaacgacctacaccgaactgagatacctacagcgtgagctatgagaaagcgccacgcttcccgaagggagaaaggcggacaggtatccggtaagcggcagggtcggaacaggagagcgcacgagggagcttccagggggaaacgcctggtatctttatagtcctgtcgggtttcgccacctctgacttgagcgtcgatttttgtgatgctcgtcaggggggcggagcctatggaaaaacgccagcaacgcggcctttttacggttcctggccttttgctggccttttgctcacatgttctttcctgcgttatcccctgattctgtggataaccgtattaccgcctttgagtgagctgataccgctcgccgcagccgaacgaccgagcgcagcgagtcagtgagcgaggaagcggaagagcgcccaatacgcaaaccgcctctccccgcgcgttggccgattcattaatgcagctggcacgacaggtttcccgactggaaagcgggcagtgagcgcaacgcaattaatgtgagttagctcactcattaggcaccccaggctttacactttatgcttccggctcgtatgttgtgtggaattgtgagcggataacaatttcacacaggaaacagctatgaccatgattacaccaagcttgcatgcaggcctatccgtagatgtacctggacatccaggtgatgccggcggcggtggtggaggcgcgcggaaagtcgcggacgcggttccagatgttgcgcagcggcaaaaagtgctccatggtcgggacgctctggccggtgaggcgtgcgcagtcgttgacgctctagaccgtgcaaaaggagagcctgtaagcgggcactcttccgtggtctggtggataaattcgcaagggtatcatggcggacgaccggggttcgaaccccggatccggccgtccgccgtgatccatgcggttaccgcccgcgtgtcgaacccaggtgtgcgacgtcagacaacgggggagcgctccttttggcttccttccaggcgcggcggctgctgcgctagcttttttggccactggccgcgcgcggcgtaagcggttaggctggaaagcgaaagcattaagtggctcgctccctgtagccggagggttattttccaagggttgagtcgcaggacccccggttcgagtctcgggccggccggactgcggcgaacgggggtttgcctccccgtcatgcaagaccccgcttgcaaattcctccggaaacagggacgagccccttttttgcttttcccagatgcatccggtgctgcggcagatgcgcccccctcctcagcagcggcaagagcaagagcagcggcagacatgcagggcaccctccccttctcctaccgcgtcaggaggggcaacatcgatccagacatgataagatacattgatgagtttggacaaaccacaactagaatgcagtgaaaaaaatgctttatttgtgaaatttgtgatgctattgctttatttgtaaccattataagctgcaataaacaagtttgtacactctcgggtgattatttacccccacccttgccgtctgcgccgtttaaaaatcaaaggggttctgccgcgcatcgctatgcgccactggcagggacacgttgcgatactggtgtttagtgctccacttaaactcaggcacaaccatccgcggcagctcggtgaagttttcactccacaggctgcgcaccatcaccaacgcgtttagcaggtcgggcgccgatatcttgaagtcgcagttggggcctccgccctgcgcgcgcgagttgcgatacacagggttgcagcactggaacactatcagcgccgggtggtgcacgctggccagcacgctcttgtcggagatcagatccgcgtccaggtcctccgcgttgctcagggcgaacggagtcaactttggtagctgccttcccaaaaagggcgcgtgcccaggctttgagttgcactcgcaccgtagtggcatcaaaaggtgaccgtgcccggtctgggcgttaggatacagcgcctgcataaaagccttgatctgcttaaaagccacctgagcctttgcgccttcagagaagaacatgccgcaagacttgccggaaaactgattggccggacaggccgcgtcgtgcacgcagcaccttgcgtcggtgttggagatctgcaccacatttcggccccaccggttcttcacgatcttggccttgctagactgctccttcagcgcgcgctgcccgttttcgctcgtcacatccatttcaatcacgtgctccttatttatcataatgcttccgtgtagacacttaagctcgccttcgatctcagcgcagcggtgcagccacaacgcgcagcccgtgggctcgtgatgcttgtaggtcacctctgcaaacgactgcaggtacgcctgcaggaatcgccccatcatcgtcacaaaggtcttgttgctggtgaaggtcagctgcaacccgcggtgctcctcgttcagccaggtcttgcatacggccgccagagcttccacttggtcaggcagtagtttgaagttcgcctttagatcgttatccacgtggtacttgtccatcagcgcgcgcgcagcctccatgcccttctcccacgcagacacgatcggcacactcagcgggttcatcaccgtaatttcactttccgcttcgctgggctcttcctcttcctcttgcgtccgcataccacgcgccactgggtcgtcttcattcagccgccgcactgtgcgcttacctcctttgccatgcttgattagcaccggtgggttgctgaaacccaccatttgtagcgccacatcttctctttcttcctcgctgtccacgattacctctggtgatggcgggcgctcgggcttgggagaagggcgcttctttttcttcttgggcgcaatggccaaatccgccgccgaggtcgatggccgcgggctgggtgtgcgcggcaccagcgcgtcttgtgatgagtcttcctcgtcctcggactcgatacgccgcctcatccgcttttttgggggcgcccggggaggcggcggcgacggggacggggacgacacgtcctccatggttgggggacgtcgcgccgcaccgcgtccgcgctcgggggtggtttcgcgctgctcctcttcccgactggccatttccttctcctataggcagaaaaagatcatggagtcagtcgagaagaaggacagcctaaccgccccctctgagttcgccaccaccgcctccaccgatgccgccaacgcgcctaccaccttccccgtcgaggcacccccgcttgaggaggaggaagtgattatcgagcaggacccaggttttgtaagcgaagacgacgaggaccgctcagtaccaacagaggataaaaagcaagaccaggacaacgcagaggcaaacgaggaacaagtcgggcggggggacgaaaggcatggcgactacctagatgtgggagacgacgtgctgttgaagcatctgcagcgccagtgcgccattatctgcgacgcgttgcaagagcgcagcgatgtgcccctcgccatagcggatgtcagccttgcctacgaacgccacctattctcaccgcgcgtaccccccaaacgccaagaaaacggcacatgcgagcccaacccgcgcctcaacttctaccccgtatttgccgtgccagaggtgcttgccacctatcacatctttttccaaaactgcaagatacccctatcctgccgtgccaaccgcagccgagcggacaagcagctggccttgcggcagggcgctgtcatacctgatatcgcctcgctcaacgaagtgccaaaaatctttgagggtcttggacgcgacgagaagcgcgcggcaaacgctctgcaacaggaaaacagcgaaaatgaaagtcactctggagtgttggtggaactcgagggtgacaacgcgcgcctagccgtactaaaacgcagcatcgaggtcacccactttgcctacccggcacttaacctaccccccaaggtcatgagcacagtcatgagtgagctgatcgtgcgccgtgcgcagcccctggagagggatgcaaatttgcaagaacaaacagaggagggcctacccgcagttggcgacgagcagctagcgcgctggcttcaaacgcgcgagcctgccgacttggaggagcgacgcaaactaatgatggccgcagtgctcgttaccgtggagcttgagtgcatgcagcggttctttgctgacccggagatgcagcgcaagctagaggaaacattgcactacacctttcgacagggctacgtacgccaggcctgcaagatctccaacgtggagctctgcaacctggtctcctaccttggaattttgcacgaaaaccgccttgggcaaaacgtgcttcattccacgctcaagggcgaggcgcgccgcgactacgtccgcgactgcgtttacttatttctatgctacacctggcagacggccatgggcgtttggcagcagtgcttggaggagtgcaacctcaaggagctgcagaaactgctaaagcaaaacttgaaggacctatggacggccttcaacgagcgctccgtggccgcgcacctggcggacatcattttccccgaacgcctgcttaaaaccctgcaacagggtctgccagacttcaccagtcaaagcatgttgcagaactttaggaactttatcctagagcgctcaggaatcttgcccgccacctgctgtgcacttcctagcgactttgtgcccattaagtaccgcgaatgccctccgccgctttggggccactgctaccttctgcagctagccaactaccttgcctaccactctgacataatggaagacgtgagcggtgacggtctactggagtgtcactgtcgctgcaacctatgcaccccgcaccgctccctggtttgcaattcgcagctgcttaacgaaagtcaaattatcggtacctttgagctgcagggtccctcgcctgacgaaaagtccgcggctccggggttgaaactcactccggggctgtggacgtcggcttaccttcgcaaatttgtacctgaggactaccacgcccacgagattaggttctacgaagaccaatcccgcccgcctaatgcggagcttaccgcctgcgtcattacccagggccacattcttggccaattgcaagccatcaacaaagcccgccaagagtttctgctacgaaagggacggggggtttacttggacccccagtccggcgaggagctcaacccaatccccccgccgccgcagccctatcagcagcagccgcgggcccttgcttcccaggatggcacccaaaaagaagctgcagctgccgccgccacccacggacgaggaggaatactgggacagtcaggcagaggaggttttggacgaggaggaggaggacatgatggaagactgggagagcctagacgaggaagcttccgaggtcgaagaggtgtcagacgaaacaccgtcaccctcggtcgcattcccctcgccggcgccccagaaatcggcaaccggttccagcatggctacaacctccgctcctcaggcgccgccggcactgcccgttcgccgacccaaccgtagatgggacaccactggaaccagggccggtaagtccaagcagccgccgccgttagcccaagagcaacaacagcgccaaggctaccgctcatggcgcgggcacaagaacgccatagttgcttgcttgcaagactgtgggggcaacatctccttcgcccgccgctttcttctctaccatcacggcgtggccttcccccgtaacatcctgcattactaccgtcatctctacagcccatactgcaccggcggcagcggcagcaacagcagcggccacacagaagcaaaggcgaccggatagcaagactctgacaaagcccaagaaatccacagcggcggcagcagcaggaggaggagcgctgcgtctggcgcccaacgaacccgtatcgacccgcgagcttagaaacaggatttttcccactctgtatgctatatttcaacagagcaggggccaagaacaagagctgaaaataaaaaacaggtctctgcgatccctcacccgcagctgcctgtatcacaaaagcgaagatcagcttcggcgcacgctggaagacgcggaggctctcttcagtaaatactgcgcgctgactcttaaggactagtttcgcgccctttctcaaatttaagcgcgaaaactacgtcatctccagcggccacacccggcgccagcacctgttgtcagcgccattatgagcaaggaaattcccacgccctacatgtggagttaccagccacaaatgggacttgcggctggagctgcccaagactactcaacccgaataaactacatgagcgcggggcggccgccgtttgtgttatgtttcaacgtgtttatttttcaattgcagaaaatttcaagtcatttttcattcagtagtatagccccaccaccacatagcttatacagatcaccgtaccttaatcaaactcacagaaccctagtattcaacctgccacctccctcccaacacacagagtacacagtcctttctccccggctggccttaaaaagcatcatatcatgggtaacagacatattcttaggtgttatattccacacggtttcctgtcgagccaaacgctcatcagtgatattaataaactccccgggcagctcacttaagttcatgtcgctgtccagctgctgagccacaggctgctgtccaacttgcggttgcttaacgggcggcgaaggagaagtccacgcctacatgggggtagagtcataatcgtgcatcaggatagggcggtggtgctgcagcagcgcgcgaataaactgctgccgccgccgctccgtcctgcaggaatacaacatggcagtggtctcctcagcgatgattcgcaccgcccgcagcataaggcgccttgtcctccgggcacagcagcgcaccctgatctcacttaaatcagcacagtaactgcagcacagcaccacaatattgttcaaaatcccacagtgcaaggcgctgtatccaaagctcatggcggggaccacagaacccacgtggccatcataccacaagcgcaggtagattaagtggcgacccctcataaacacgctggacataaacattacctcttttggcatgttgtaattcaccacctcccggtaccatataaacctctgattaaacatggcgccatccaccaccatcctaaaccagctggccaaaacctgcccgccggctatacactgcagggaaccgggactggaacaatgacagtggagagcccaggactcgtaaccatggatcatcatgctcgtcatgatatcaatgttggcacaacacaggcacacgtgcatacacttcctcaggattacaagctcctcccgcgttagaaccatatcccagggaacaacccattcctgaatcagcgtaaatcccacactgcagggaagacctcgcacgtaactcacgttgtgcattgtcaaagtgttacattcgggcagcagcggatgatcctccagtatggtagcgcgggtttctgtctcaaaaggaggtagacgatccctactgtacggagtgcgccgagacaaccgagatcgtgttggtcgtagtgtcatgccaaatggaacgccggacgtagtcatatttcctgaagcaaaaccaggtgcgggcgtgacaaacagatctgcgtctccggtctcgccgcttagatcgctctgtgtagtagttgtagtatatccactctctcaaagcatccaggcgccccctggcttcgggttctatgtaaactccttcatgcgccgctgccctgataacatccaccaccgcagaataagccacacccagccaacctacacattcgttctgcgagtcacacacgggaggagcgggaagagctggaagaaccatgtttttttttttattccaaaagattatccaaaacctcaaaatgaagatctattaagtgaacgcgctcccctccggtggcgtggtcaaactctacagccaaagaacagataatggcatttgtaagatgttgcacaatggcttccaaaaggcaaacggccctcacgtccaagtggacgtaaaggctaaacccttcagggtgaatctcctctataaacattccagcaccttcaaccatgcccaaataattctcatctcgccaccttctcaatatatctctaagcaaatcccgaatattaagtccggccattgtaaaaatctgctccagagcgccctccaccttcagcctcaagcagcgaatcatgattgcaaaaattcaggttcctcacagacctgtataagattcaaaagcggaacattaacaaaaataccgcgatcccgtaggtcccttcgcagggccagctgaacataatcgtgcaggtctgcacggaccagcgcggccacttccccgccaggaaccatgacaaaagaacccacactgattatgacacgcatactcggagctatgctaaccagcgtagccccgatgtaagcttgttgcatgggcggcgatataaaatgcaaggtgctgctcaaaaaatcaggcaaagcctcgcgcaaaaaagaaagcacatcgtagtcatgctcatgcagataaaggcaggtaagctccggaaccaccacagaaaaagacaccatttttctctcaaacatgtctgcgggtttctgcataaacacaaaataaaataacaaaaaaacatttaaacattagaagcctgtcttacaacaggaaaaacaacccttataagcataagacggactacggccatgccggcgtgaccgtaaaaaaactggtcaccgtgattaaaaagcaccaccgacagctcctcggtcatgtccggagtcataatgtaagactcggtaaacacatcaggttgattcacatcggtcagtgctaaaaagcgaccgaaatagcccgggggaatacatacccgcaggcgtagagacaacattacagcccccataggaggtataacaaaattaataggagagaaaaacacataaacacctgaaaaaccctcctgcctaggcaaaatagcaccctcccgctccagaacaacatacagcgcttccacagcggcagccataacagtcagccttaccagtaaaaaagaaaacctattaaaaaaacaccactcgacacggcaccagctcaatcagtcacagtgtaaaaaagggccaagtgcagagcgagtatatataggactaaaaaatgacgtaacggttaaagtccacaaaaaacacccagaaaaccgcacgcgaacctacgcccagaaacgaaagccaaaaaacccacaacttcctcaaatcgtcacttccgttttcccacgttacgtcacttcccattttaagaaaactacaattcccaacacatacaagttactccgcccttaattaaatcggatccgatatctagatgtattcgcgaggtaccgagctcgaattctctggccgtcgttttacaacgtcgtgactgggaaaaccctggcgttacccaacttaatcgccttgcagcacatccccctttcgccagctggcgtaatagcgaagaggcccgcaccgatcgcccttcccaacagttgcgcagcctgaatggcgaatggcgcctgatgcggtattttctccttacgcatctgtgcggtatttcacaccgcatatggtgcactctcagtacaatctgctctgatgccgcatagttaagccagccccgacacccgccaacacccgctgacgcgccctgacgggcttgtctgctcccggcatccgcttacagacaagctgtgaccgtctccgggagctgcatgtgtcagaggttttcaccgtcatcaccgaaacgcgcga

SEQ ID NO: 71 - DNA, 11635 bp, synthetic construct
  source 1..11635: mol_type = other DNA
ggtacccaactccatgcttaacagtccccaggtacagcccaccctgcgtcgcaaccaggaacagctctacagcttcctggagcgccactcgccctacttccgcagccacagtgcgcagattaggagcgccacttctttttgtcacttgaaaaacatgtaaaaataatgtactaggagacactttcaataaaggcaaatgtttttatttgtacactctcgggtgattatttaccccccacccttgccgtctgcgccgtttaaaaatcaaaggggttctgccgcgcatcgctatgcgccactggcagggacacgttgcgatactggtgtttagtgctccacttaaactcaggcacaaccatccgcggcagctcggtgaagttttcactccacaggctgcgcaccatcaccaacgcgtttagcaggtcgggcgccgatatcttgaagtcgcagttggggcctccgccctgcgcgcgcgagttgcgatacacagggttgcagcactggaacactatcagcgccgggtggtgcacgctggccagcacgctcttgtcggagatcagatccgcgtccaggtcctccgcgttgctcagggcgaacggagtcaactttggtagctgccttcccaaaaagggtgcatgcccaggctttgagttgcactcgcaccgtagtggcatcagaaggtgaccgtgcccggtctgggcgttaggatacagcgcctgcatgaaagccttgatctgcttaaaagccacctgagcctttgcgccttcagagaagaacatgccgcaagacttgccggaaaactgattggccggacaggccgcgtcatgcacgcagcaccttgcgtcggtgttggagatctgcaccacatttcggccccaccggttcttcacgatcttggccttgctagactgctccttcagcgcgcgctgcccgttttcgctcgtcacatccatttcaatcacgtgctccttatttatcataatgctcccgtgtagacacttaagctcgccttcgatctcagcgcagcggtgcagccacaacgcgcagcccgtgggctcgtggtgcttgtaggttacctctgcaaacgactgcaggtacgcctgcaggaatcgccccatcatcgtcacaaaggtcttgttgctggtgaaggtcagctgcaacccgcggtgctcctcgtttagccaggtcttgcatacggccgccagagcttccacttggtcaggcagtagcttgaagtttgcctttagatcgttatccacgtggtacttgtccatcaacgcgcgcgcagcctccatgcccttctcccacgcagacacgatcggcaggctcagcgggtttatcaccgtgctttcactttccgcttcactggactcttccttttcctcttgcgtccgcataccccgcgccactgggtcgtcttcattcagccgccgcaccgtgcgcttacctcccttgccgtgcttgattagcaccggtgggttgctgaaacccaccatttgtagcgccacatcttctctttcttcctcgctgtccacgatcacctctggggatggcgggcgctcgggcttgggagaggggcgcttctttttctttttggacgcaatggccaaatccgccgtcgaggtcgatggccgcgggctgggtgtgcgcggcaccagcgcatcttgtgacgagtcttcttcgtcctcggactcgagacgccgcctcagccgcttttttgggggcgcgcggggaggcggcggcgacggcgacggggacgacacgtcctccatggttggtggacgtcgcgccgcaccgcgtccgcgctcgggggtggtttcgcgctgctcctcttcccgactggccatttccttctcctataggcagaaaaagatcatggagtcagtcgagaaggaggacagcctaaccgccccctttgagttcgccaccaccgcctccaccgatgccgccaacgcgcctaccaccttccccgtcgaggcacccccgcttgaggaggaggaagtgattatcgagcaggacccaggttttgtaagcgaagacgacgaggatcgctcagtaccaacagaggataaaaagcaagaccaggacgacgcagaggcaaacgaggaacaagtcgggcggggggaccaaaggcatggcgactacctagatgtgggagacgacgtgctgttgaagcatctgcagcgccagtgcgccattatctgcgacgcgttgcaagagcgcagcgatgtgcccctcgccatagcggatgtcagccttgcctacgaacgccacctgttctcaccgcgcgtaccccccaaacgccaagaaaacggcacatgcgagcccaacccgcgcctcaacttctaccccgtatttgccgtgccagaggtgcttgccacctatcacatctttttccaaaactgcaagatacccctatcctgccgtgccaaccgcagccgagcggacaagcagctggccttgcggcagggcgctgtcatacctgatatcgcctcgctcgacgaagtgccaaaaatctttgagggtcttggacgcgacgagaaacgcgcggcaaacgctctgcaacaagaaaacagcgaaaatgaaagtcactgtggagtgctggtggaacttgagggtgacaacgcgcgcctagccgtgctgaaacgcagcatcgaggtcacccactttgcctacccggcacttaacctaccccccaaggttatgagcacagtcatgagcgagctgatcgtgcgccgtgcacgacccctggagagggatgcaaacttgcaagaacaaaccgaggagggcctacccgcagttggcgatgagcagctggcgcgctggcttgagacgcgcgagcctgccgacttggaggagcgacgcaagctaatgatggccgcagtgcttgttaccgtggagcttgagtgcatgcagcggttctttgctgacccggagatgcagcgcaagctagaggaaacgttgcactacacctttcgccagggctacgtgcgccaggcctgcaaaatttccaacgtggagctctgcaacctggtctcctaccttggaattttgcacgaaaaccgcctcgggcaaaacgtgcttcattccacgctcaagggcgaggcgcgccgcgactacgtccgcgactgcgtttacttatttctgtgctacacctggcaaacggccatgggcgtgtggcagcaatgcctggaggagcgcaacctaaaggagctgcagaagctgctaaagcaaaacttgaaggacctatggacggccttcaacgagcgctccgtggccgcgcacctggcggacattatcttccccgaacgcctgcttaaaaccctgcaacagggtctgccagacttcaccagtcaaagcatgttgcaaaactttaggaactttatcctagagcgttcaggaattctgcccgccacctgctgtgcgcttcctagcgactttgtgcccattaagtaccgtgaatgccctccgccgctttggggtcactgctaccttctgcagctagccaactaccttgcctaccactccgacatcatggaagacgtgagcggtgacggcctactggagtgtcactgtcgctgcaacctatgcaccccgcaccgctccctggtctgcaattcgcaactgcttagcgaaagtcaaattatcggtacctttgagctgcagggtccctcgcctgacgaaaagtccgcggctccggggttgaaactcactccggggctgtggacgtcggcttaccttcgcaaatttgtacctgaggactaccacgcccacgagattaggttctacgaagaccaatcccgcccgccaaatgcggagcttaccgcctgcgtcattacccagggccacatccttggccaattgcaagccatcaacaaagcccgccaagagtttctgctacgaaagggacggggggtttacctggacccccagtccggcgaggagctcaacccaatccccccgccgccgcagccctatcagcagccgcgggcccttgcttcccaggatggcacccaaaaagaagctgcagctgccgccgccgccacccacggacgaggaggaatactgggacagtcaggcagaggaggttttggacgaggaggaggagatgatggaagactgggacagcctagacgaagcttccgaggccgaagaggtgtcagacgaaacaccgtcaccctcggtcgcattcccctcgccggcgccccagaaattggcaaccgttcccagcatcgctacaacctccgctcctcaggcgccgccggcactgcctgttcgccgacccaaccgtagatgggacaccactggaaccagggccggtaagtctaagcagccgccgccgttagcccaagagcaacaacagcgccaaggctaccgctcgtggcgcgggcacaagaacgccatagttgcttgcttgcaagactgtgggggcaacatctccttcgcccgccgctttcttctctaccatcacggcgtggccttcccccgtaacatcctgcattactaccgtcatctctacagcccctactgcaccggcggcagcggcagcggcagcaacagcagcggtcacacagaagcaaaggcgaccggatagcaagactctgacaaagcccaagaaatccacagcggcggcagcagcaggaggaggagcgctgcgtctggcgcccaacgaacccgtatcgacccgcgagcttagaaataggatttttcccactctgtatgctatatttcaacaaagcaggggccaagaacaagagctgaaaataaaaaacaggtctctgcgctccctcacccgcagctgcctgtatcacaaaagcgaagatcagcttcggcgcacgctggaagacgcggaggctctcttcagcaaatactgcgcgctgactcttaaggactagtttcgcgccctttctcaaatttaagcgcgaaaactacgtcatctccagcggccacacccggcgccagcacctgtcgtcagcgccattatgagcaaggaaattcccacgccctacatgtggagttaccagccacaaatgggacttgcggctggagctgcccaagactactcaacccgaataaactacatgagcgcgggaccccacatgatatcccgggtcaacggaatccgcgcccaccgaaaccgaattctcctcgaacaggcggctattaccaccacacctcgtaataaccttaatccccgtagttggcccgctgccctggtgtaccaggaaagtcccgctcccaccactgtggtacttcccagagacgcccaggccgaagttcagatgactaactcaggggcgcagcttgcgggcggctttcgtcacagggtgcggtcgcccgggcgttttagggcggagtaacttgcatgtattgggaattgtagtttttttaaaatgggaagtgacgtatcgtgggaaaacggaagtgaagatttgaggaagttgtgggttttttggctttcgtttctgggcgtaggttcgcgtgcggttttctgggtgttttttgtggactttaaccgttacgtcattttttagtcctatatatactcgctctgtacttggccctttttacactgtgactgattgagctggtgccgtgtcgagtggtgttttttaataggtttttttactggtaaggctgactgttatggctgccgctgtggaagcgctgtatgttgttctggagcgggagggtgctattttgcctaggcaggagggtttttcaggtgtttatgtgtttttctctcctattaattttgttatacctcctatgggggctgtaatgttgtctctacgcctgcgggtatgtattcccccgggctatttcggtcgctttttagcactgaccgatgttaaccaacctgatgtgtttaccgagtcttacattatgactccggacatgaccgaggaactgtcggtggtgctttttaatcacggtgaccagtttttttacggtcacgccggcatggccgtagtccgtcttatgcttataagggttgtttttcctgttgtaagacaggcttctaatgtttaaatgtttttttttttgttattttattttgtgtttaatgcaggaacccgcagacatgtttgagagaaaaatggtgtctttttctgtggtggttccggaacttacctgcctttatctgcatgagcatgactacgatgtgcttgcttttttgcgcgaggctttgcctgattttttgagcagcaccttgcattttatatcgccgcccatgcaacaagcttacataggggctacgctggttagcatagctccgagtatgcgtgtcataatcagtgtgggttcttttgtcatggttcctggcggggaagtggccgcgctggtccgtgcagacctgcacgattatgttcagctggccctgcgaagggacctacgggatcgcggtatttttgttaatgttccgcttttgaatcttatacaggtctgtgaggaacctgaatttttgcaatcatgattcgctgcttgaggctgaaggtggagggcgctctggagcagatttttacaatggccggacttaatattcgggatttgcttagagacatattgataaggtggcgagatgaaaattatttgggcatggttgaaggtgctggaatgtttatagaggagattcaccctgaagggtttagcctttacgtccacttggacgtgagggcagtttgccttttggaagccattgtgcaacatcttacaaatgccattatctgttctttggctgtagagtttgaccacgccaccggaggggagcgcgttcacttaatagatcttcattttgaggttttggataatcttttggaataaaaaaaaaaaaacatggttcttccagctcttcccgctcctcccgtgtgtgactcgcagaacgaatgtgtaggttggctgggtgtggcttattctgcggtggtggatgttatcagggcagcggcgcatgaaggagtttacatagaacccgaagccagggggcgcctggatgctttgagagagtggatatactacaactactacacagagcgagctaagcgacgagaccggagacgcagatctgtttgtcacgcccgcacctggttttgcttcaggaaatatgactacgtccggcgttccatttggcatgacactacgaccaacacgatctcggttgtctcggcgcactccgtacagtagggatcgcctacctccttttgagacagagacccgcgctaccatactggaggatcatccgctgctgcccgaatgtaacactttgacaatgcacaacgtgagttacgtgcgaggtcttccctgcagtgtgggatttacgctgattcaggaatgggttgttccctgggatatggttctgacgcgggaggagcttgtaatcctgaggaagtgtatgcacgtgtgcctgtgttgtgccaacattgatatcatgacgagcatgatgatccatggttacgagtcctgggctctccactgtcattgttccagtcccggttccctgcagtgcatagccggcgggcaggttttggccagctggtttaggatggtggtggatggcgccatgtttaatcagaggtttatatggtaccgggaggtggtgaattacaacatgccaaaagaggtaatgtttatgtccagcgtgtttatgaggggtcgccacttaatctacctgcgcttgtggtatgatggccacgtgggttctgtggtccccgccatgagctttggatacagcgccttgcactgtgggattttgaacaatattgtggtgctgtgctgcagttactgtgctgatttaagtgagatcagggtgcgctgctgtgcccggaggacaaggcgtctcatgctgcgggcggtgcgaatcatcgctgaggagaccactgccatgttgtattcctgcaggacggagcggcggcggcagcagtttattcgcgcgctgctgcagcaccaccgccctatcctgatgcacgattatgactctacccccatgtaggcgtggacttccccttcgccgcccgttgagcaaccgcaagttggacagcagcctgtggctcagcagctggacagcgacatgaacttaagcgagctgcccggggagtttattaatatcactgatgagcgtttggctcgacaggaaaccgtgtggaatataacacctaagaatatgtctgttacccatgatatgatgctttttaaggccagccggggagaaaggactgtgtactctgtgtgttgggagggaggtggcaggttgaatactagggttctgtgagtttgattaaggtacggtgatcaatataagctatgtggtggtggggctatactactgaatgaaaaatgacttgaaattttctgcaattgaaaaataaacacgttgaaacataacatgcaacaggttcacgattctctagtgaatccacagaaactagcgaggtaagcacttactctatgtcttttacatggtcctgggaaagtggaaaatacaccactgaaacttttgctaccaactcttacaccttctcctacattgcccaggaataaaatcgatgtaggatgttgcccctcctgacgcggtaggagaaggggagggtgccctgcatgtctgccgctgctcttgctcttgccgctgctgaggaggggggcgcatctgccgcagcaccggatgcatctgggaaaagcaaaaaaggggctcgtccctgtttccggaggaatttgcaagcggggtcttgcatgacggggaggcaaacccccgttcgccgcagtccggccggcccgagactcgaaccgggggtcctgcgactcaacccttggaaaataaccctccggctacagggagcgagccacttaatgctttcgctttccagcctaaccgcttacgccgcgcgcggccagtggccaaaaaagctagcgcagcagccgccgcgcctggaaggaagccaaaaggagcgctcccccgttgtctgacgtcgcacacctgggttcgacacgcgggcggtaaccgcatggatcacggcggacggccggatccggggttcgaaccccggtcgtccgccatgatacccttgcgaatttatccaccagaccacggaagagtgcccgcttacaggctctccttttgcacggtctagagcgtcaacgactgcgcacgcctcaccggccagagcgtcccgaccatggagcactttttgccgctgcgcaacatctggaaccgcgtccgcgactttccgcgcgcctccaccaccgccgccggcatcacctggatgtccaggtacatctacggattacgtcgacgtttaaaccatatgatcagctcactcaaaggcggtaatacggttatccacagaatcaggggataacgcaggaaagaacatgtgagcaaaaggccagcaaaaggccaggaaccgtaaaaaggccgcgttgctggcgtttttccataggctccgcccccctgacgagcatcacaaaaatcgacgctcaagtcagaggtggcgaaacccgacaggactataaagataccaggcgtttccccctggaagctccctcgtgcgctctcctgttccgaccctgccgcttaccggatacctgtccgcctttctcccttcgggaagcgtggcgctttctcatagctcacgctgtaggtatctcagttcggtgtaggtcgttcgctccaagctgggctgtgtgcacgaaccccccgttcagcccgaccgctgcgccttatccggtaactatcgtcttgagtccaacccggtaagacacgacttatcgccactggcagcagccactggtaacaggattagcagagcgaggtatgtaggcggtgctacagagttcttgaagtggtggcctaactacggctacactagaagaacagtatttggtatctgcgctctgctgaagccagttaccttcggaaaaagagttggtagctcttgatccggcaaacaaaccaccgctggtagcggtggtttttttgtttgcaagcagcagattacgcgcagaaaaaaaggatctcaagaagatcctttgatcttttctacggggtctgacgctcagtggaacgaaaactcacgttaagggattttggtcatgagattatcaaaaaggatcttcacctagatccttttaaattaaaaatgaagttttaaatcaatctaaagtatatatgagtaaacttggtctgacagttaccaatgcttaatcagtgaggcacctatctcagcgatctgtctatttcgttcatccatagttgcctgactccccgtcgtgtagataactacgatacgggagggcttaccatctggccccagtgctgcaatgataccgcgagacccacgctcaccggctccagatttatcagcaataaaccagccagccggaagggccgagcgcagaagtggtcctgcaactttatccgcctccatccagtctattaattgttgccgggaagctagagtaagtagttcgccagttaatagtttgcgcaacgttgttgccattgctacaggcatcgtggtgtcacgctcgtcgtttggtatggcttcattcagctccggttcccaacgatcaaggcgagttacatgatcccccatgttgtgcaaaaaagcggttagctccttcggtcctccgatcgttgtcagaagtaagttggccgcagtgttatcactcatggttatggcagcactgcataattctcttactgtcatgccatccgtaagatgcttttctgtgactggtgagtactcaaccaagtcattctgagaatagtgtatgcggcgaccgagttgctcttgcccggcgtcaatacgggataataccgcgccacatagcagaactttaaaagtgctcatcattggaaaacgttcttcggggcgaaaactctcaaggatcttaccgctgttgagatccagttcgatgtaacccactcgtgcacccaactgatcttcagcatcttttactttcaccagcgtttctgggtgagcaaaaacaggaaggcaaaatgccgcaaaaaagggaataagggcgacacggaaatgttgaatactcatactcttcctttttcaatattattgaagcatttatcagggttattgtctcatgagcggatacatatttgaatgtatttagaaaaataaacaaataggggttccgcgcacatttccccgaaaagtgccacctaaattgtaagcgttaatattttgttaaaattcgcgttaaatttttgttaaatcagctcattttttaaccaataggccgaaatcggcaaaatcccttataaatcaaaagaatagaccgagatagggttgagtgttgttccagtttggaacaagagtccactattaaagaacgtggactccaacgtcaaagggcgaaaaaccgtctatcagggcgatggcccactacgtgaaccatcaccctaatcaagttttttggggtcgaggtgccgtaaagcactaaatcggaaccctaaagggagcccccgatttagagcttgacggggaaagccggcgaacgtggcgagaaaggaagggaagaaagcgaaaggagcgggcgctagggcgctggcaagtgtagcggtcacgctgcgcgtaaccaccacacccgccgcgcttaatgcgccgctacagggcgcgatggatcc

SEQ ID NO: 72 - DNA, 18932 bp, synthetic construct
  source 1..18932: mol_type = other DNA
tcttccgcttcctcgctcactgactcgctgcgctcggtcgttcggctgcggcgagcggtatcagctcactcaaaggcggtaatacggttatccacagaatcaggggataacgcaggaaagaacatgtgagcaaaaggccagcaaaaggccaggaaccgtaaaaaggccgcgttgctggcgtttttccataggctccgcccccctgacgagcatcacaaaaatcgacgctcaagtcagaggtggcgaaacccgacaggactataaagataccaggcgtttccccctggaagctccctcgtgcgctctcctgttccgaccctgccgcttaccggatacctgtccgcctttctcccttcgggaagcgtggcgctttctcatagctcacgctgtaggtatctcagttcggtgtaggtcgttcgctccaagctgggctgtgtgcacgaaccccccgttcagcccgaccgctgcgccttatccggtaactatcgtcttgagtccaacccggtaagacacgacttatcgccactggcagcagccactggtaacaggattagcagagcgaggtatgtaggcggtgctacagagttcttgaagtggtggcctaactacggctacactagaagaacagtatttggtatctgcgctctgctgaagccagttaccttcggaaaaagagttggtagctcttgatccggcaaacaaaccaccgctggtagcggtggtttttttgtttgcaagcagcagattacgcgcagaaaaaaaggatctcaagaagatcctttgatcttttctacggggtctgacgctcagtggaacgaaaactcacgttaagggattttggtcatgagattatcaaaaaggatcttcacctagatccttttaaattaaaaatgaagttttaaatcaatctaaagtatatatgagtaaacttggtctgacagttaccaatgcttaatcagtgaggcacctatctcagcgatctgtctatttcgttcatccatagttgcctgactccccgtcgtgtagataactacgatacgggagggcttaccatctggccccagtgctgcaatgataccgcgagacccacgctcaccggctccagatttatcagcaataaaccagccagccggaagggccgagcgcagaagtggtcctgcaactttatccgcctccatccagtctattaattgttgccgggaagctagagtaagtagttcgccagttaatagtttgcgcaacgttgttgccattgctacaggcatcgtggtgtcacgctcgtcgtttggtatggcttcattcagctccggttcccaacgatcaaggcgagttacatgatcccccatgttgtgcaaaaaagcggttagctccttcggtcctccgatcgttgtcagaagtaagttggccgcagtgttatcactcatggttatggcagcactgcataattctcttactgtcatgccatccgtaagatgcttttctgtgactggtgagtactcaaccaagtcattctgagaatagtgtatgcggcgaccgagttgctcttgcccggcgtcaatacgggataataccgcgccacatagcagaactttaaaagtgctcatcattggaaaacgttcttcggggcgaaaactctcaaggatcttaccgctgttgagatccagttcgatgtaacccactcgtgcacccaactgatcttcagcatcttttactttcaccagcgtttctgggtgagcaaaaacaggaaggcaaaatgccgcaaaaaagggaataagggcgacacggaaatgttgaatactcatactcttcctttttcaatattattgaagcatttatcagggttattgtctcatgagcggatacatatttgaatgtatttagaaaaataaacaaataggggttccgcgcacatttccccgaaaagtgccacctgacgtctaagaaaccattattatcatgacattaacctataaaaataggcgtatcacgaggccctttcgtctcgcgcgtttcggtgatgacggtgaaaacctctgacacatgcagctcccggagacggtcacagcttgtctgtaagcggatgccgggagcagacaagcccgtcagggcgcgtcagcgggtgttggcgggtgtcggggctggcttaactatgcggcatcagagcagattgtactgagagtgcaccataaaattgtaaacgttaatattttgttaaaattcgcgttaaatttttgttaaatcagctcattttttaaccaataggccgaaatcggcaaaatcccttataaatcaaaagaatagcccgagatagggttgagtgttgttccagtttggaacaagagtccactattaaagaacgtggactccaacgtcaaagggcgaaaaaccgtctatcagggcgatggcccactacgtgaaccatcacccaaatcaagttttttggggtcgaggtgccgtaaagcactaaatcggaaccctaaagggagcccccgatttagagcttgacggggaaagccggcgaacgtggcgagaaaggaagggaagaaagcgaaaggagcgggcgctagggcgctggcaagtgtagcggtcacgctgcgcgtaaccaccacacccgccgcgcttaatgcgccgctacagggcgcgtactatggttgctttgacgtatgcggtgtgaaataccgcacagatgcgtaaggagaaaataccgcatcaggcgccattcgccattcaggctgcgcaactgttgggaagggcgatcggtgcgggcctcttcgctattacgccagctggcgaaagggggatgtgctgcaaggcgattaagttgggtaacgccagggttttcccagtcacgacgttgtaaaacgacggccagtgccaagcttaaggtgcacggcccacgtggccactagtacttctcgacagaagcaccatgtccttgggtccggcctgctgaatgcgcaggcggtcggccatgccccaggcttcgttttgacatcggcgcaggtctttgtagtagtcttgcatgagcctttctaccggcacttcttcttctccttcctcttgtcctgcatctcttgcatctatcgctgcggcggcggcggagtttggccgtaggtggcgccctcttcctcccatgcgtgtgaccccgaagcccctcatcggctgaagcagggctaggtcggcgacaacgcgctcggctaatatggcctgctgcacctgcgtgagggtagactggaagtcatccatgtccacaaagcggtggtatgcgcccgtgttgatggtgtaagtgcagttggccataacggaccagttaacggtctggtgacccggctgcgagagctcggtgtacctgagacgcgagtaagccctcgagtcaaatacgtagtcgttgcaagtccgcaccaggtactggtatcccaccaaaaagtgcggcggcggctggcggtagaggggccagcgtagggtggccggggctccgggggcgagatcttccaacataaggcgatgatatccgtagatgtacctggacatccaggtgatgccggcggcggtggtggaggcgcgcggaaagtcgcggacgcggttccagatgttgcgcagcggcaaaaagtgctccatggtcgggacgctctggccggtcaggcgcgcgcaatcgttgacgctctaccgtgcaaaaggagagcctgtaagcgggcactcttccgtggtctggtggataaattcgcaagggtatcatggcggacgaccggggttcgagccccgtatccggccgtccgccgtgatccatgcggttaccgcccgcgtgtcgaacccaggtgtgcgacgtcagacaacgggggagtgctccttttggcttccttccaggcgcggcggctgctgcgctagcttttttggccactggccgcgcgcagcgtaagcggttaggctggaaagcgaaagcattaagtggctcgctccctgtagccggagggttattttccaagggttgagtcgcgggacccccggttcgagtctcggaccggccggactgcggcgaacgggggtttgcctccccgtcatgcaagaccccgcttgcaaattcctccggaaacagggacgagccccttttttgcttttcccagatgcatccggtgctgcggcagatgcgcccccctcctcagcagcggcaagagcaagagcagcggcagacatgcagggcaccctcccctcctcctaccgcgtcaggaggggcgacatccgcggttgacgcggcagcagatggtgattacgaacccccgcggcgccgggcccggcactacctggacttggaggagggcgagggcctggcgcggctaggagcgccctctcctgagcggtacccaagggtgcagctgaagcgtgatacgcgtgaggcgtacgtgccgcggcagaacctgtttcgcgaccgcgagggagaggagcccgaggagatgcgggatcgaaagttccacgcagggcgcgagctgcggcatggcctgaatcgcgagcggttgctgcgcgaggaggactttgagcccgacgcgcgaaccgggattagtcccgcgcgcgcacacgtggcggccgccgacctggtaaccgcatacgagcagacggtgaaccaggagattaactttcaaaaaagctttaacaaccacgtgcgtacgcttgtggcgcgcgaggaggtggctataggactgatgcatctgtgggactttgtaagcgcgctggagcaaaacccaaatagcaagccgctcatggcgcagctgttccttatagtgcagcacagcagggacaacgaggcattcagggatgcgctgctaaacatagtagagcccgagggccgctggctgctcgatttgataaacatcctgcagagcatagtggtgcaggagcgcagcttgagcctggctgacaaggtggccgccatcaactattccatgcttagcctgggcaagttttacgcccgcaagatataccataccccttacgttcccatagacaaggaggtaaagatcgaggggttctacatgcgcatggcgctgaaggtgcttaccttgagcgacgacctgggcgtttatcgcaacgagcgcatccacaaggccgtgagcgtgagccggcggcgcgagctcagcgaccgcgagctgatgcacagcctgcaaagggccctggctggcacgggcagcggcgatagagaggccgagtcctactttgacgcgggcgctgacctgcgctgggccccaagccgacgcgccctggaggcagctggggccggacctgggctggcggtggcacccgcgcgcgctggcaacgtcggcggcgtggaggaatatgacgaggacgatgagtacgagccagaggacggcgagtactaagcggtgatgtttctgatcagatgatgcaagacgcaacggacccggcggtgcgggcggcgctgcagagccagccgtccggccttaactccacggacgactggcgccaggtcatggaccgcatcatgtcgctgactgcgcgcaatcctgacgcgttccggcagcagccgcaggccaaccggctctccgcaattctggaagcggtggtcccggcgcgcgcaaaccccacgcacgagaaggtgctggcgatcgtaaacgcgctggccgaaaacagggccatccggcccgacgaggccggcctggtctacgacgcgctgcttcagcgcgtggctcgttacaacagcggcaacgtgcagaccaacctggaccggctggtgggggatgtgcgcgaggccgtggcgcagcgtgagcgcgcgcagcagcagggcaacctgggctccatggttgcactaaacgccttcctgagtacacagcccgccaacgtgccgcggggacaggaggactacaccaactttgtgagcgcactgcggctaatggtgactgagacaccgcaaagtgaggtgtaccagtctgggccagactattttttccagaccagtagacaaggcctgcagaccgtaaacctgagccaggctttcaaaaacttgcaggggctgtggggggtgcgggctcccacaggcgaccgcgcgaccgtgtctagcttgctgacgcccaactcgcgcctgttgctgctgctaatagcgcccttcacggacagtggcagcgtgtcccgggacacatacctaggtcacttgctgacactgtaccgcgaggccataggtcaggcgcatgtggacgagcatactttccaggagattacaagtgtcagccgcgcgctggggcaggaggacacgggcagcctggaggcaaccctaaactacctgctgaccaaccggcggcagaagatcccctcgttgcacagtttcgcaccctttggcgcatcccattctccagtaactttatgtccatgggcgcactcacagacctgggccaaaaccttctctacgccaactccgcccacgcgctagacatgacttttgaggtggatcccatggacgagcccacccttctttatgttttgtttgaagtctttgacgtggtccgtgtgcaccggccgcaccgcggcgtcatcgaaaccgtgtacctgcgcacgcccttctcggccggcaacgccacaacataaagaagcaagcaacatcaacaacagctgccgccatgggctccagtgagcaggaactgaaagccattgtcaaagatcttggttgtgggccatattttttgggcacctatgacaagcgctttccaggctttgtttctccacacaagctcgcctgcgccatagtcaatacggccggtcgcgagactgggggcgtacactggatggcctttgcctggaacccgcactcaaaaacatgctacctctttgagccctttggcttttctgaccagcgactcaagcaggtttaccagtttgagtacgagtcactcctgcgccgtagcgccattgcttcttcccccgaccgctgtataacgctggaaaagtccacccaaagcgtacaggggcccaactcggccgcctgtggactattctgctgcatgtttctccacgcctttgccaactggccccaaactcccatggatcacaaccccaccatgaaccttattaccggggtacccaactccatgctcaacagtccccaggtacagcccaccctgcgtcgcaaccaggaacagctctacagcttcctggagcgccactcgccctacttccgcagccacagtgcgcagattaggagcgccacttctttttgtcacttgaaaaacatgtaaaaataatgtactagagacactttcaataaaggcaaatgcttttatttgtacactctcgggtgattatttacccccacccttgccgtctgcgccgtttaaaaatcaaaggggttctgccgcgcatcgctatgcgccactggcagggacacgttgcgatactggtgtttagtgctccacttaaactcaggcacaaccatccgcggcagctcggtgaagttttcactccacaggctgcgcaccatcaccaacgcgtttagcaggtcgggcgccgatatcttgaagtcgcagttggggcctccgccctgcgcgcgcgagttgcgatacacagggttgcagcactggaacactatcagcgccgggtggtgcacgctggccagcacgctcttgtcggagatcagatccgcgtccaggtcctccgcgttgctcagggcgaacggagtcaactttggtagctgccttcccaaaaagggcgcgtgcccaggctttgagttgcactcgcaccgtagtggcatcaaaaggtgaccgtgcccggtctgggcgttaggatacagcgcctgcataaaagccttgatctgcttaaaagccacctgagcctttgcgccttcagagaagaacatgccgcaagacttgccggaaaactgattggccggacaggccgcgtcgtgcacgcagcaccttgcgtcggtgttggagatctgcaccacatttcggccccaccggttcttcacgatcttggccttgctagactgctccttcagcgcgcgctgcccgttttcgctcgtcacatccatttcaatcacgtgctccttatttatcataatgcttccgtgtagacacttaagctcgccttcgatctcagcgcagcggtgcagccacaacgcgcagcccgtgggctcgtgatgcttgtaggtcacctctgcaaacgactgcaggtacgcctgcaggaatcgccccatcatcgtcacaaaggtcttgttgctggtgaaggtcagctgcaacccgcggtgctcctcgttcagccaggtcttgcatacggccgccagagcttccacttggtcaggcagtagtttgaagttcgcctttagatcgttatccacgtggtacttgtccatcagcgcgcgcgcagcctccatgcccttctcccacgcagacacgatcggcacactcagcgggttcatcaccgtaatttcactttccgcttcgctgggctcttcctcttcctcttgcgtccgcataccacgcgccactgggtcgtcttcattcagccgccgcactgtgcgcttacctcctttgccatgcttgattagcaccggtgggttgctgaaacccaccatttgtagcgccacatcttctctttcttcctcgctgtccacgattacctctggtgatggcgggcgctcgggcttgggagaagggcgcttctttttcttcttgggcgcaatggccaaatccgccgccgaggtcgatggccgcgggctgggtgtgcgcggcaccagcgcgtcttgtgatgagtcttcctcgtcctcggactcgatacgccgcctcatccgcttttttgggggcgcccggggaggcggcggcgacggggacggggacgacacgtcctccatggttgggggacgtcgcgccgcaccgcgtccgcgctcgggggtggtttcgcgctgctcctcttcccgactggccatttccttctcctataggcagaaaaagatcatggagtcagtcgagaagaaggacagcctaaccgccccctctgagttcgccaccaccgcctccaccgatgccgccaacgcgcctaccaccttccccgtcgaggcacccccgcttgaggaggaggaagtgattatcgagcaggacccaggttttgtaagcgaagacgacgaggaccgctcagtaccaacagaggataaaaagcaagaccaggacaacgcagaggcaaacgaggaacaagtcgggcggggggacgaaaggcatggcgactacctagatgtgggagacgacgtgctgttgaagcatctgcagcgccagtgcgccattatctgcgacgcgttgcaagagcgcagcgatgtgcccctcgccatagcggatgtcagccttgcctacgaacgccacctattctcaccgcgcgtaccccccaaacgccaagaaaacggcacatgcgagcccaacccgcgcctcaacttctaccccgtatttgccgtgccagaggtgcttgccacctatcacatctttttccaaaactgcaagatacccctatcctgccgtgccaaccgcagccgagcggacaagcagctggccttgcggcagggcgctgtcatacctgatatcgcctcgctcaacgaagtgccaaaaatctttgagggtcttggacgcgacgagaagcgcgcggcaaacgctctgcaacaggaaaacagcgaaaatgaaagtcactctggagtgttggtggaactcgagggtgacaacgcgcgcctagccgtactaaaacgcagcatcgaggtcacccactttgcctacccggcacttaacctaccccccaaggtcatgagcacagtcatgagtgagctgatcgtgcgccgtgcgcagcccctggagagggatgcaaatttgcaagaacaaacagaggagggcctacccgcagttggcgacgagcagctagcgcgctggcttcaaacgcgcgagcctgccgacttggaggagcgacgcaaactaatgatggccgcagtgctcgttaccgtggagcttgagtgcatgcagcggttctttgctgacccggagatgcagcgcaagctagaggaaacattgcactacacctttcgacagggctacgtacgccaggcctgcaagatctccaacgtggagctctgcaacctggtctcctaccttggaattttgcacgaaaaccgccttgggcaaaacgtgcttcattccacgctcaagggcgaggcgcgccgcgactacgtccgcgactgcgtttacttatttctatgctacacctggcagacggccatgggcgtttggcagcagtgcttggaggagtgcaacctcaaggagctgcagaaactgctaaagcaaaacttgaaggacctatggacggccttcaacgagcgctccgtggccgcgcacctggcggacatcattttccccgaacgcctgcttaaaaccctgcaacagggtctgccagacttcaccagtcaaagcatgttgcagaactttaggaactttatcctagagcgctcaggaatcttgcccgccacctgctgtgcacttcctagcgactttgtgcccattaagtaccgcgaatgccctccgccgctttggggccactgctaccttctgcagctagccaactaccttgcctaccactctgacataatggaagacgtgagcggtgacggtctactggagtgtcactgtcgctgcaacctatgcaccccgcaccgctccctggtttgcaattcgcagctgcttaacgaaagtcaaattatcggtacctttgagctgcagggtccctcgcctgacgaaaagtccgcggctccggggttgaaactcactccggggctgtggacgtcggcttaccttcgcaaatttgtacctgaggactaccacgcccacgagattaggttctacgaagaccaatcccgcccgccaaatgcggagcttaccgcctgcgtcattacccagggccacattcttggccaattgcaagccatcaacaaagcccgccaagagtttctgctacgaaagggacggggggtttacttggacccccagtccggcgaggagctcaacccaatccccccgccgccgcagccctatcagcagcagccgcgggcccttgcttcccaggatggcacccaaaaagaagctgcagctgccgccgccacccacggacgaggaggaatactgggacagtcaggcagaggaggttttggacgaggaggaggaggacatgatggaagactgggagagcctagacgaggaagcttccgaggtcgaagaggtgtcagacgaaacaccgtcaccctcggtcgcattcccctcgccggcgccccagaaatcggcaaccggttccagcatggctacaacctccgctcctcaggcgccgccggcactgcccgttcgccgacccaaccgtagatgggacaccactggaaccagggccggtaagtccaagcagccgccgccgttagcccaagagcaacaacagcgccaaggctaccgctcatggcgcgggcacaagaacgccatagttgcttgcttgcaagactgtgggggcaacatctccttcgcccgccgctttcttctctaccatcacggcgtggccttcccccgtaacatcctgcattactaccgtcatctctacagcccatactgcaccggcggcagcggcagcggcagcaacagcagcggccacacagaagcaaaggcgaccggatagcaagactctgacaaagcccaagaaatccacagcggcggcagcagcaggaggaggagcgctgcgtctggcgcccaacgaacccgtatcgacccgcgagcttagaaacaggatttttcccactctgtatgctatatttcaacagagcaggggccaagaacaagagctgaaaataaaaaacaggtctctgcgatccctcacccgcagctgcctgtatcacaaaagcgaagatcagcttcggcgcacgctggaagacgcggaggctctcttcagtaaatactgcgcgctgactcttaaggactagtttcgcgccctttctcaaatttaagcgcgaaaactacgtcatctccagcggccacacccggcgccagcacctgtcgtcagcgccattatgagcaaggaaattcccacgccctacatgtggagttaccagccacaaatgggacttgcggctggagctgcccaagactactcaacccgaataaactacatgagcgcgggaccccacatgatatcccgggtcaacggaatccgcgcccaccgaaaccgaattctcttggaacaggcggctattaccaccacacctcgtaataaccttaatccccgtagttggcccgctgccctggtgtaccaggaaagtcccgctcccaccactgtggtacttcccagagacgcccaggccgaagttcagatgactaactcaggggcgcagcttgcgggcggctttcgtcacagggtgcggtcgcccgggcagggtataactcacctgacaatcagagggcgaggtattcagctcaacgacgagtcggtgagctcctcgcttggtctccgtccggacgggacatttcagatcggcggcgccggccgtccttcattcacgcctcgtcaggcaatcctaactctgcagacctcgtcctctgagccgcgctctggaggcattggaactctgcaatttattgaggagtttgtgccatcggtctactttaaccccttctcgggacctcccggccactatccggatcaatttattcctaactttgacgcggtaaaggactcggcggacggctacgactgaatgttaagtggagaggcagagcaactgcgcctgaaacacctggtccactgtcgccgccacaagtgctttgcccgcgactccggtgagttttgctactttgaattgcccgaggatcatatcgagggcccggcgcacggcgtccggcttaccgcccagggagagcttgcccgtagcctgattcgggagtttacccagcgccccctgctagttgagcgggacaggggaccctgtgttctcactgtgatttgcaactgtcctaaccttggattacatcaagatcctctagttaattaactagagtacccggggatcttattccctttaactaataaaaaaaaataataaagcatcacttacttaaaatcagttagcaaatttctgtccagtttattcagcagcacctccttgccctcctcccagctctggtattgcagcttcctcctggctgcaaactttctccacaatctaaatggaatgtcagtttcctcctgttcctgtccatccgcacccactatcttcatgttgttgcagatgaagcgcgcaagaccgtctgaagataccttcaaccccgtgtatccatatgacacggaaaccggtcctccaactgtgccttttcttactcctccctttgtatcccccaatgggtttcaagagagtccccctggggtactctctttgcgcctatccgaacctctagttacctccaatggcatgcttgcgctcaaaatgggcaacggcctctctctggacgaggccggcaaccttacctcccaaaatgtaaccactgtgagcccacctctcaaaaaaaccaagtcaaacataaacctggaaatatctgcacccctcacagttacctcagaagccctaactgtggctgccgccgcacctctaatggtcgcgggcaacacactcaccatgcaatcacaggccccgctaaccgtgcacgactccaaacttagcattgccacccaaggacccctcacagtgtcagaaggaaagctagccctgcaaacatcaggccccctcaccaccaccgatagcagtacccttactatcactgcctcaccccctctaactactgccactggtagcttgggcattgacttgaaagagcccatttatacacaaaatggaaaactaggactaaagtacggggctcctttgcatgtaacagacgacctaaacactttgaccgtagcaactggtccaggtgtgactattaataatacttccttgcaaactaaagttactggagccttgggttttgattcacaaggcaatatgcaacttaatgtagcaggaggactaaggattgattctcaaaacagacgccttatacttgatgttagttatccgtttgatgctcaaaaccaactaaatctaagactaggacagggccctctttttataaactcagcccacaacttggatattaactacaacaaaggcctttacttgtttacagcttcaaacaattccaaaaagcttgaggttaacctaagcactgccaaggggttgatgtttgacgctacagccatagccattaatgcaggagatgggcttgaatttggttcacctaatgcaccaaacacaaatcccctcaaaacaaaaattggccatggcctagaatttgattcaaacaaggctatggttcctaaactaggaactggccttagttttgacagcacaggtgccattacagtaggaaacaaaaataatgataagctaactttgtggaccacaccagctccatctcctaactgtagactaaatgcagagaaagatgctaaactcactttggtcttaacaaaatgtggcagtcaaatacttgctacagtttcagttttggctgttaaaggcagtttggctccaatatctggaacagttcaaagtgctcatcttattataagatttgacgaaaatggagtgctactaaacaattccttcctggacccagaatattggaactttagaaatggagatcttactgaaggcacagcctatacaaacgctgttggatttatgcctaacctatcagcttatccaaaatctcacggtaaaactgccaaaagtaacattgtcagtcaagtttacttaaacggagacaaaactaaacctgtaacactaaccattacactaaacggtacacaggaaacaggagacacaactccaagtgcatactctatgtcattttcatgggactggtctggccacaactacattaatgaaatatttgccacatcctcttacactttttcatacattgcccaagaataaagaatcgtttgtgttatgtttcaacgtgtttatttttcaattgcagaaaatttcaagtcatttttcattcagtagtatagccccaccaccacatagcttatacagatcaccgtaccttaatcaaactcacagaaccctagtattcaacctgccacctccctcccaacacacagagtacacagtcctttctccccggctggccttaaaaagcatcatatcatgggtaacagacatattcttaggtgttatattccacacggtttcctgtcgagccaaacgctcatcagtgatattaataaactccccgggcagctcacttaagttcatgtcgctgtccagctgctgagccacaggctgctgtccaacttgcggttgcttaacgggcggcgaaggagaagtccacgcctacatgggggtagagtcataatcgtgcatcaggatagggcggtggtgctgcagcagcgcgcgaataaactgctgccgccgccgctccgtcctgcaggaatacaacatggcagtggtctcctcagcgatgattcgcaccgcccgcagcataaggcgccttgtcctccgggcacagcagcgcaccctgatctcacttaaatcagcacagtaactgcagcacagcaccacaatattgttcaaaatcccacagtgcaaggcgctgtatccaaagctcatggcggggaccacagaacccacgtggccatcataccacaagcgcaggtagattaagtggcgacccctcataaacacgctggacataaacattacctcttttggcatgttgtaattcaccacctcccggtaccatataaacctctgattaaacatggcgccatccaccaccatcctaaaccagctggccaaaacctgcccgccggctatacactgcagggaaccgggactggaacaatgacagtggagagcccaggactcgtaaccatggatcatcatgctcgtcatgatatcaatgttggcacaacacaggcacacgtgcatacacttcctcaggattacaagctcctcccgcgttagaaccatatcccagggaacaacccattcctgaatcagcgtaaatcccacactgcagggaagacctcgcacgtaactcacgttgtgcattgtcaaagtgttacattcgggcagcagcggatgatcctccagtatggtagcgcgggtttctgtctcaaaaggaggtagacgatccctactgtacggagtgcgccgagacaaccgagatcgtgttggtcgtagtgtcatgccaaatggaacgccggacgtagtcatatttcctgaagcaaaaccaggtgcgggcgtgacaaacagatctgcgtctccggtctcgccgcttagatcgctctgtgtagtagttgtagtatatccactctctcaaagcatccaggcgccccctggcttcgggttctatgtaaactccttcatgcgccgctgccctgataacatccaccaccgcagaataagccacacccagccaacctacacattcgttctgcgagtcacacacgggaggagcgggaagagctggaagaaccatgtttttttttttattccaaaagattatccaaaacctcaaaatgaagatctattaagtgaacgcgctcccctccggtggcgtggtcaaactctacagccaaagaacagataatggcatttgtaagatgttgcacaatggcttccaaaaggcaaacggccctcacgtccaagtggacgtaaaggctaaacccttcagggtgaatctcctctataaacattccagcaccttcaaccatgcccaaataattctcatctcgccaccttctcaatatatctctaagcaaatcccgaatattaagtccggccattgtaaaaatctgctccagagcgccctccaccttcagcctcaagcagcgaatcatgattgcaaaaattcaggttcctcacagacctgtataagattcaaaagcggaacattaacaaaaataccgcgatcccgtaggtcccttcgcagggccagctgaacataatcgtgcaggtctgcacggaccagcgcggccacttccccgccaggaaccttgacaaaagaacccacactgattatgacacgcatactcggagctatgctaaccagcgtagccccgatgtaagctttgttgcatgggcggcgatataaaatgcaaggtgctgctcaaaaaatcaggcaaagcctcgcgcaaaaaagaaagcacatcgtagtcatgctcatgcagataaaggcaggtaagctccggaaccaccacagaaaaagacaccatttttctctcaaacatgtctgcgggtttctgcataaacacaaaataaaataacaaaaaaacatttaaacattagaagcctgtcttacaacaggaaaaacaacccttataagcataagacggactacggccatgccggcgtgaccgtaaaaaaactggtcaccgtgattaaaaagcaccaccgacagctcctcggtcatgtccggagtcataatgtaagactcggtaaacacatcaggttgattcatcggtcagtgctaaaaagcgaccgaaatagcccgggggaatacatacccgcaggcgtagagacaacattacagcccccataggaggtataacaaaattaataggagagaaaaacacataaacacctgaaaaaccctcctgcctaggcaaaatagcaccctcccgctccagaacaacatacagcgcttccacagcggcagccataacagtcagccttaccagtaaaaaagaaaacctattaaaaaaacaccactcgacacggcaccagctcaatcagtcacagtgtaaaaaagggccaagtgcagagcgagtatatataggactaaaaaatgacgtaacggttaaagtccacaaaaaacacccagaaaaccgcacgcgaacctacgcccagaaacgaaagccaaaaaacccacaacttcctcaaatcgtcacttccgttttcccacgttacgtaacttcccattttaagaaaactacaattcccaacacatacaagttactccgccctaaaacctacgtcacccgccccgttcccacgccccgcgccacgtcacaaactccaccccctcattatcatattggcttcaatccaaaataaggtatattattgatgatttattttggattgaagccaatatgataatgagggggtggagtttgtgacgtggcgcggggcgtgggaacggggcgggtgacgtagtagtgtggcggaagtgtgatgttgcaagtgtggcggaacacatgtaagcgacggatgtggcaaaagtgacgtttttggtgtgcgccggatccacaggacgggtgtggtcgccatgatcgcgtagtcgatagtggctccaagtagcgaagcgagcaggactgggcggcggccaaagcggtcggacagtgctccgagaacgggtgcgcatagaaattgcatcaacgcatatagcgctagcagcacgccatagtgactggcgatgctgtcggaatggacgatatcccgcaagaggcccggcagtaccggcataaccaagcctatgcctacagcatccagggtgacggtgccgaggatgacgatgagcgcattgttagatttcatacacggtgcctgactgcgttagcaatttaactgtgataaactaccgcattaaagcttatcgaattcgtaatcatggtcatagctgtttcctgtgtgaaattgttatccgctcacaattccacacaacatacgagccggaagcataaagtgtaaagcctggggtgcctaatgagtgagctaactcacattaattgcgttgcgctcactgcccgctttccagtcgggaaacctgtcgtgccagctgcattaatgaatcggccaacgcgcggggagaggcggtttgcgtattgggcgc

SEQ ID NO: 73 - DNA, 239 bp, synthetic construct
  source 1..239: mol_type = other DNA
gggaaaacggaagtgacgatttgaggaagttgtgggttttttggctttcgtttctgggcgtaggttcgcgtgcggttttctgggtgttttttgtggactttaaccgttacgtcattttttagtcctatatatactcgctctgcacttggcccttttttacactgtgactgattgagctggtgccgtgtcgagtggtgtttttttaataggttttcttttttactggtaaggctgactgt

SEQ ID NO: 74 - DNA, 330 bp, synthetic construct; identical to SEQ ID NO: 51
  source 1..330: mol_type = other DNA

SEQ ID NO: 75 - DNA, 36 bp, synthetic construct
  source 1..36: mol_type = other DNA
taagagtcagcgcgcagtatttactgaagagagcct

SEQ ID NO: 76 - DNA, 699 bp, synthetic construct
  source 1..699: mol_type = other DNA
atggagcactttttgccgctgcgcaacatctggaaccgcgtccgcgactttccgcgcgcctccaccaccgccgccggcatcacctggatgtccaggtacatctacggatatcatcgccttatgttggaagatctcgcccccggagccccggccaccctacgctggcccctctaccgccagccgccgccgcactttttggtgggataccagtacctggtgcggacttgcaacgactacgtatttgactcgagggcttactcgcgtctcaggtacaccgagctctcgcagccgggtcaccagaccgttaactggtccgttatggccaactgcacttacaccatcaacacgggcgcataccaccgctttgtggacatggatgacttccagtctaccctcacgcaggtgcagcaggccatattagccgagcgcgttgtcgccgacctagccctgcttcagccgatgaggggcttcggggtcacacgcatgggaggaagagggcgccacctacggccaaactccgccgccgccgcagcgatagatgcaagagatgcaggacaagaggaaggagaagaagaagtgccggtagaaaggctcatgcaagactactacaaagacctgcgccgatgtcaaaacgaagcctggggcatggccgaccgcctgcgcattcagcaggccggacccaaggacatggtgcttctg

SEQ ID NO: 77 - DNA, 1590 bp, synthetic construct
  source 1..1590: mol_type = other DNA
atggccagtcgggaagaggagcagcgcgaaaccacccccgagcgcggacgcggtgcggcgcgacgtcccccaaccatggaggacgtgtcgtccccgtccccgtcgccgccgcctccccgggcgcccccaaaaaagcggatgaggcggcgtatcgagtccgaggacgaggaagactcatcacaagacgcgctggtgccgcgcacacccagcccgcggccatcgacctcggcggcggatttggccattgcgcccaagaagaaaaagaagcgcccttctcccaagcccgagcgcccgccatcaccagaggtaatcgtggacagcgaggaagaaagagaagatgtggcgctacaaatggtgggtttcagcaacccaccggtgctaatcaagcatggcaaaggaggtaagcgcacagtgcggcggctgaatgaagacgacccagtggcgcgtggtatgcggacgcaagaggaagaggaagagcccagcgaagcggaaagtgaaattacggtgatgaacccgctgagtgtgccgatcgtgtctgcgtgggagaagggcatggaggctgcgcgcgcgctgatggacaagtaccacgtggataacgatctaaaggcgaacttcaaactactgcctgaccaagtggaagctctggcggccgtatgcaagacctggctgaacgaggagcaccgcgggttgcagctgaccttcaccagcaacaagacctttgtgacgatgatggggcgattcctgcaggcgtacctgcagtcgtttgcagaggtgacctacaagcatcacgagcccacgggctgcgcgttgtggctgcaccgctgcgctgagatcgaaggcgagcttaagtgtctacacggaagcattatgataaataaggagcacgtgattgaaatggatgtgacgagcgaaaacgggcagcgcgcgctgaaggagcagtctagcaaggccaagatcgtgaagaaccggtggggccgaaatgtggtgcagatctccaacaccgacgcaaggtgctgcgtgcacgacgcggcctgtccggccaatcagttttccggcaagtcttgcggcatgttcttctctgaaggcgcaaaggctcaggtggcttttaagcagatcaaggcttttatgcaggcgctgtatcctaacgcccagaccgggcacggtcaccttttgatgccactacggtgcgagtgcaactcaaagcctgggcacgcgccctttttgggaaggcagctaccaaagttgactccgttcgccctgagcaacgcggaggacctggacgcggatctgatctccgacaagagcgtgctggccagcgtgcaccacccggcgctgatagtgttccagtgctgcaaccctgtgtatcgcaactcgcgcgcgcagggcggaggccccaactgcgacttcaagatatcggcgcccgacctgctaaacgcgttggtgatggtgcgcagcctgtggagtgaaaacttcaccgagctgccgcggatggttgtgcctgagtttaagtggagcactaaacaccagtatcgcaacgtgtccctgccagtggcgcatagcgatgcgcggcagaacccctttgatttttaa

SEQ ID NO: 78 - DNA, 278 bp, synthetic construct
  source 1..278: mol_type = other DNA
tcgaggtgagccccacgttctgcttcactctccccatctcccccccctccccacccccaattttgtatttatttattttttaattattttgtgcagcgatgggggcggggggggggggggggcgcgcgccaggcggggcggggcggggcgaggggcggggcggggcgaggcggagaggtgcggcggcagccaatcagagcggcgcgctccgaaagtttccttttatggcgaggcggcggcggcggcggccctataaaaagcgaagcgcgcggcgggcg

SEQ ID NO: 79 - DNA, 35 bp, synthetic construct
  source 1..35: mol_type = other DNA
acggcgcagacggcaagggtgggggtaaataatca

SEQ ID NO: 80 - DNA, 9977 bp, synthetic construct
  source 1..9977: mol_type = other DNA
tgcagctctggcccgtgtctcaaaatctctgatgttacattgcacaagataaaaatatatcatcatgaacaataaaactgtctgcttacataaacagtaatacaaggggtgttatgagccatattcaacgggaaacgtcgaggccgcgattaaattccaacatggatgctgatttatatgggtataaatgggctcgcgataatgtcgggcaatcaggtgcgacaatctatcgcttgtatgggaagcccgatgcgccagagttgtttctgaaacatggcaaaggtagcgttgccaatgatgttacagatgagatggtcagactaaactggctgacggaatttatgcctcttccgaccatcaagcattttatccgtactcctgatgatgcatggttactcaccactgcgatccccggaaaaacagcattccaggtattagaagaatatcctgattcaggtgaaaatattgttgatgcgctggcagtgttcctgcgccggttgcattcgattcctgtttgtaattgtccttttaacagcgatcgcgtatttcgtctcgctcaggcgcaatcacgaatgaataacggtttggttgatgcgagtgattttgatgacgagcgtaatggctggcctgttgaacaagtctggaaagaaatgcataaacttttgccattctcaccggattcagtcgtcactcatggtgatttctcacttgataaccttatttttgacgaggggaaattaataggttgtattgatgttggacgagtcggaatcgcagaccgataccaggatcttgccatcctatggaactgcctcggtgagttttctccttcattacagaaacggctttttcaaaaatatggtattgataatcctgatatgaataaattgcagtttcatttgatgctcgatgagtttttctaatcagaattggttaattggttgtaacattattcagattgggcttgatttaaaacttcatttttaatttaaaaggatctaggtgaagatcctttttgataatctcatgaccaaaatcccttaacgtgagttttcgttccactgagcgtcagaccccgtagaaaagatcaaaggatcttcttgagatcctttttttctgcgcgtaatctgctgcttgcaaacaaaaaaaccaccgctaccagcggtggtttgtttgccggatcaagagctaccaactctttttccgaaggtaactggcttcagcagagcgcagataccaaatactgttcttctagtgtagccgtagttaggccaccacttcaagaactctgtagcaccgcctacatacctcgctctgctaatcctgttaccagtggctgctgccagtggcgataagtcgtgtcttaccgggttggactcaagacgatagttaccggataaggcgcagcggtcgggctgaacggggggttcgtgcacacagcccagcttggagcgaacgacctacaccgaactgagatacctacagcgtgagctatgagaaagcgccacgcttcccgaagggagaaaggcggacaggtatccggtaagcggcagggtcggaacaggagagcgcacgagggagcttccagggggaaacgcctggtatctttatagtcctgtcgggtttcgccacctctgacttgagcgtcgatttttgtgatgctcgtcaggggggcggagcctatggaaaaacgccagcaacgcggcctttttacggttcctggccttttgctggccttttgctcacatgttctttcctgcgttatcccctgattctgtggataaccgtattaccgcctttgagtgagctgataccgctcgccgcagccgaacgaccgagcgcagcgagtcagtgagcgaggaagcggaagagcgcccaatacgcaaaccgcctctccccgcgcgttggccgattcattaatgcagctggcacgacaggtttcccgactggaaagcgggcagtgagcgcaacgcaattaatgtgagttagctcactcattaggcaccccaggctttacactttatgcttccggctcgtatgttgtgtggaattgtgagcggataacaatttcacacaggaaacagctatgaccatgattacaccaagcttgcatgcaggcctatccgtagatgtacctggacatccaggtgatgccggcggcggtggtggaggcgcgcggaaagtcgcggacgcggttccagatgttgcgcagcggcaaaaagtgctccatggtcgggacgctctggccggtgaggcgtgcgcagtcgttgacgctctagaccgtgcaaaaggagagcctgtaagcgggcactcttccgtggtctggtggataaattcgcaagggtatcatggcggacgaccggggttcgaaccccggatccggccgtccgccgtgatccatgcggttaccgcccgcgtgtcgaacccaggtgtgcgacgtcagacaacgggggagcgctccttttggcttccttccaggcgcggcggctgctgcgctagcttttttggccactggccgcgcgcggcgtaagcggttaggctggaaagcgaaagcattaagtggctcgctccctgtagccggagggttattttccaagggttgagtcgcaggacccccggttcgagtctcgggccggccggactgcggcgaacgggggtttgcctccccgtcatgcaagaccccgcttgcaaattcctccggaaacagggacgagccccttttttgcttttcccagatgcatccggtgctgcggcagatgcgcccccctcctcagcagcggcaagagcaagagcagcggcagacatgcagggcaccctccccttctcctaccgcgtcaggaggggcaacatcgatccagacatgataagatacattgatgagtttggacaaaccacaactagaatgcagtgaaaaaaatgctttatttgtgaaatttgtgatgctattgctttatttgtaaccattataagctgcaataaacaagtttgtacactctcgggtgattatttacccccacccttgccgtctgcgccgtttaaaaatcaaaggggttctgccgcgcatcgctatgcgccactggcagggacacgttgcgatactggtgtttagtgctccacttaaactcaggcacaaccatccgcggcagctcggtgaagttttcactccacaggctgcgcaccatcaccaacgcgtttagcaggtcgggcgccgatatcttgaagtcgcagttggggcctccgccctgcgcgcgcgagttgcgatacacagggttgcagcactggaacactatcagcgccgggtggtgcacgctggccagcacgctcttgtcggagatcagatccgcgtccaggtcctccgcgttgctcagggcgaacggagtcaactttggtagctgccttcccaaaaagggcgcgtgcccaggctttgagttgcactcgcaccgtagtggcatcaaaaggtgaccgtgcccggtctgggcgttaggatacagcgcctgcataaaagccttgatctgcttaaaagccacctgagcctttgcgccttcagagaagaacatgccgcaagacttgccggaaaactgattggccggacaggccgcgtcgtgcacgcagcaccttgcgtcggtgttggagatctgcaccacatttcggccccaccggttcttcacgatcttggccttgctagactgctccttcagcgcgcgctgcccgttttcgctcgtcacatccatttcaatcacgtgctccttatttatcataatgcttccgtgtagacacttaagctcgccttcgatctcagcgcagcggtgcagccacaacgcgcagcccgtgggctcgtgatgcttgtaggtcacctctgcaaacgactgcaggtacgcctgcaggaatcgccccatcatcgtcacaaaggtcttgttgctggtgaaggtcagctgcaacccgcggtgctcctcgttcagccaggtcttgcatacggccgccagagcttccacttggtcaggcagtagtttgaagttcgcctttagatcgttatccacgtggtacttgtccatcagcgcgcgcgcagcctccatgcccttctcccacgcagacacgatcggcacactcagcgggttcatcaccgtaatttcactttccgcttcgctgggctcttcctcttcctcttgcgtccgcataccacgcgccactgggtcgtcttcattcagccgccgcactgtgcgcttacctcctttgccatgcttgattagcaccggtgggttgctgaaacccaccatttgtagcgccacatcttctctttcttcctcgctgtccacgattacctctggtgatggcgggcgctcgggcttgggagaagggcgcttctttttcttcttgggcgcaatggccaaatccgccgccgaggtcgatggccgcgggctgggtgtgcgcggcaccagcgcgtcttgtgatgagtcttcctcgtcctcggactcgatacgccgcctcatccgcttttttgggggcgcccggggaggcggcggcgacggggacggggacgacacgtcctccatggttgggggacgtcgcgccgcaccgcgtccgcgctcgggggtggtttcgcgctgctcctcttcccgactggccatcttgaaggacctatggacggccttcaacgagcgctccgtggccgcgcacctggcggacatcattttccccgaacgcctgcttaaaaccctgcaacagggtctgccagacttcaccagtcaaagcatgttgcagaactttaggaactttatcctagagcgctcaggaatcttgcccgccacctgctgtgcacttcctagcgactttgtgcccattaagtaccgcgaatgccctccgccgctttggggccactgctaccttctgcagctagccaactaccttgcctaccactctgacataatggaagacgtgagcggtgacggtctactggagtgtcactgtcgctgcaacctatgcaccccgcaccgctccctggtttgcaattcgcagctgcttaacgaaagtcaaattatcggtacctttgagctgcagggtccctcgcctgacgaaaagtccgcggctccggggttgaaactcactccggggctgtggacgtcggcttaccttcgcaaatttgtacctgaggactaccacgcccacgagattaggttctacgaagaccaatcccgcccgcctaatgcggagcttaccgcctgcgtcattacccagggccacattcttggccaattgcaagccatcaacaaagcccgccaagagtttctgctacgaaagggacggggggtttacttggacccccagtccggcgaggagctcaacccaatccccccgccgccgcagccctatcagcagcagccgcgggcccttgcttcccaggatggcacccaaaaagaagctgcagctgccgccgccacccacggacgaggaggaatactgggacagtcaggcagaggaggttttggacgaggaggaggaggacatgatggaagactgggagagcctagacgaggaagcttccgaggtcgaagaggtgtcagacgaaacaccgtcaccctcggtcgcattcccctcgccggcgccccagaaatcggcaaccggttccagcatggctacaacctccgctcctcaggcgccgccggcactgcccgttcgccgacccaaccgtagatgggacaccactggaaccagggccggtaagtccaagcagccgccgccgttagcccaagagcaacaacagcgccaaggctaccgctcatggcgcgggcacaagaacgccatagttgcttgcttgcaagactgtgggggcaacatctccttcgcccgccgctttcttctctaccatcacggcgtggccttcccccgtaacatcctgcattactaccgtcatctctacagcccatactgcaccggcggcagcggcagcaacagcagcggccacacagaagcaaaggcgaccggatagcaagactctgacaaagcccaagaaatccacagcggcggcagcagcaggaggaggagcgctgcgtctggcgcccaacgaacccgtatcgacccgcgagcttagaaacaggatttttcccactctgtatgctatatttcaacagagcaggggccaagaacaagagctgaaaataaaaaacaggtctctgcgatccctcacccgcagctgcctgtatcacaaaagcgaagatcagcttcggcgcacgctggaagacgcggaggctctcttcagtaaatactgcgcgctgactcttaaggactagtttcgcgccctttctcaaatttaagcgcgaaaactacgtcatctccagcggccacacccggcgccagcacctgttgtcagcgccattatgagcaaggaaattcccacgccctacatgtggagttaccagccacaaatgggacttgcggctggagctgcccaagactactcaacccgaataaactacatgagcgcggggcggccgccgtttgtgttatgtttcaacgtgtttatttttcaattgcagaaaatttcaagtcatttttcattcagtagtatagccccaccaccacatagcttatacagatcaccgtaccttaatcaaactcacagaaccctagtattcaacctgccacctccctcccaacacacagagtacacagtcctttctccccggctggccttaaaaagcatcatatcatgggtaacagacatattcttaggtgttatattccacacggtttcctgtcgagccaaacgctcatcagtgatattaataaactccccgggcagctcacttaagttcatgtcgctgtccagctgctgagccacaggctgctgtccaacttgcggttgcttaacgggcggcgaaggagaagtccacgcctacatgggggtagagtcataatcgtgcatcaggatagggcggtggtgctgcagcagcgcgcgaataaactgctgccgccgccgctccgtcctgcaggaatacaacatggcagtggtctcctcagcgatgattcgcaccgcccgcagcataaggcgccttgtcctccgggcacagcagcgcaccctgatctcacttaaatcagcacagtaactgcagcacagcaccacaatattgttcaaaatcccacagtgcaaggcgctgtatccaaagctcatggcggggaccacagaacccacgtggccatcataccacaagcgcaggtagattaagtggcgacccctcataaacacgctggacataaacattacctcttttggcatgttgtaattcaccacctcccggtaccatataaacctctgattaaacatggcgccatccaccaccatcctaaaccagctggccaaaacctgcccgccggctatacactgcagggaaccgggactggaacaatgacagtggagagcccaggactcgtaaccatggatcatcatgctcgtcatgatatcaatgttggcacaacacaggcacacgtgcatacacttcctcaggattacaagctcctcccgcgttagaaccatatcccagggaacaacccattcctgaatcagcgtaaatcccacactgcagggaagacctcgcacgtaactcacgttgtgcattgtcaaagtgttacattcgggcagcagcggatgatcctccagtatggtagcgcgggtttctgtctcaaaaggaggtagacgatccctactgtacggagtgcgccgagacaaccgagatcgtgttggtcgtagtgtcatgccaaatggaacgccggacgtagtcatatttcctgaagcaaaaccaggtgcgggcgtgacaaacagatctgcgtctccggtctcgccgcttagatcgctctgtgtagtagttgtagtatatccactctctcaaagcatccaggcgccccctggcttcgggttctatgtaaactccttcatgcgccgctgccctgataacatccaccaccgcagaataagccacacccagccaacctacacattcgttctgcgagtcacacacgggaggagcgggaagagctggaagaaccatgtttttttttttattccaaaagattatccaaaacctcaaaatgaagatctattaagtgaacgcgctcccctccggtggcgtggtcaaactctacagccaaagaacagataatggcatttgtaagatgttgcacaatggcttccaaaaggcaaacggccctcacgtccaagtggacgtaaaggctaaacccttcagggtgaatctcctctataaacattccagcaccttcaaccatgcccaaataattctcatctcgccaccttctcaatatatctctaagcaaatcccgaatattaagtccggccattgtaaaaatctgctccagagcgccctccaccttcagcctcaagcagcgaatcatgattgcaaaaattcaggttcctcacagacctgtataagattcaaaagcggaacattaacaaaaataccgcgatcccgtaggtcccttcgcagggccagctgaacataatcgtgcaggtctgcacggaccagcgcggccacttccccgccaggaaccatgacaaaagaacccacactgattatgacacgcatactcggagctatgctaaccagcgtagccccgatgtaagcttgttgcatgggcggcgatataaaatgcaaggtgctgctcaaaaaatcaggcaaagcctcgcgcaaaaaagaaagcacatcgtagtcatgctcatgcagataaaggcaggtaagctccggaaccaccacagaaaaagacaccatttttctctcaaacatgtctgcgggtttctgcataaacacaaaataaaataacaaaaaaacatttaaacattagaagcctgtcttacaacaggaaaaacaacccttataagcataagacggactacggccatgccggcgtgaccgtaaaaaaactggtcaccgtgattaaaaagcaccaccgacagctcctcggtcatgtccggagtcataatgtaagactcggtaaacacatcaggttgattcacatcggtcagtgctaaaaagcgaccgaaatagcccgggggaatacatacccgcaggcgtagagacaacattacagcccccataggaggtataacaaaattaataggagagaaaaacacataaacacctgaaaaaccctcctgcctaggcaaaatagcaccctcccgctccagaacaacatacagcgcttccacagcggcagccataacagtcagccttaccagtaaaaaagaaaacctattaaaaaaacaccactcgacacggcaccagctcaatcagtcacagtgtaaaaaagggccaagtgcagagcgagtatatataggactaaaaaatgacgtaacggttaaagtccacaaaaaacacccagaaaaccgcacgcgaacctacgcccagaaacgaaagccaaaaaacccacaacttcctcaaatcgtcacttccgttttcccacgttacgtcacttcccattttaagaaaactacaattcccaacacatacaagttactccgcccttaattaaatcggatccgatatctagatgtattcgcgaggtaccgagctcgaattctctggccgtcgttttacaacgtcgtgactgggaaaaccctggcgttacccaacttaatcgccttgcagcacatccccctttcgccagctggcgtaatagcgaagaggcccgcaccgatcgcccttcccaacagttgcgcagcctgaatggcgaatggcgcctgatgcggtattttctccttacgcatctgtgcggtatttcacaccgcatatggtgcactctcagtacaatctgctctgatgccgcatagttaagccagccccgacacccgccaacacccgctgacgcgccctgacgggcttgtctgctcccggcatccgcttacagacaagctgtgaccgtctccgggagctgcatgtgtcagaggttttcaccgtcatcaccgaaacgcgcga

SEQ ID NO: 81 - DNA, 10977 bp, synthetic construct
  source 1..10977: mol_type = other DNA
tgcagctctggcccgtgtctcaaaatctctgatgttacattgcacaagataaaaatatatcatcatgaacaataaaactgtctgcttacataaacagtaatacaaggggtgttatgagccatattcaacgggaaacgtcgaggccgcgattaaattccaacatggatgctgatttatatgggtataaatgggctcgcgataatgtcgggcaatcaggtgcgacaatctatcgcttgtatgggaagcccgatgcgccagagttgtttctgaaacatggcaaaggtagcgttgccaatgatgttacagatgagatggtcagactaaactggctgacggaatttatgcctcttccgaccatcaagcattttatccgtactcctgatgatgcatggttactcaccactgcgatccccggaaaaacagcattccaggtattagaagaatatcctgattcaggtgaaaatattgttgatgcgctggcagtgttcctgcgccggttgcattcgattcctgtttgtaattgtccttttaacagcgatcgcgtatttcgtctcgctcaggcgcaatcacgaatgaataacggtttggttgatgcgagtgattttgatgacgagcgtaatggctggcctgttgaacaagtctggaaagaaatgcataaacttttgccattctcaccggattcagtcgtcactcatggtgatttctcacttgataaccttatttttgacgaggggaaattaataggttgtattgatgttggacgagtcggaatcgcagaccgataccaggatcttgccatcctatggaactgcctcggtgagttttctccttcattacagaaacggctttttcaaaaatatggtattgataatcctgatatgaataaattgcagtttcatttgatgctcgatgagtttttctaatcagaattggttaattggttgtaacattattcagattgggcttgatttaaaacttcatttttaatttaaaaggatctaggtgaagatcctttttgataatctcatgaccaaaatcccttaacgtgagttttcgttccactgagcgtcagaccccgtagaaaagatcaaaggatcttcttgagatcctttttttctgcgcgtaatctgctgcttgcaaacaaaaaaaccaccgctaccagcggtggtttgtttgccggatcaagagctaccaactctttttccgaaggtaactggcttcagcagagcgcagataccaaatactgttcttctagtgtagccgtagttaggccaccacttcaagaactctgtagcaccgcctacatacctcgctctgctaatcctgttaccagtggctgctgccagtggcgataagtcgtgtcttaccgggttggactcaagacgatagttaccggataaggcgcagcggtcgggctgaacggggggttcgtgcacacagcccagcttggagcgaacgacctacaccgaactgagatacctacagcgtgagctatgagaaagcgccacgcttcccgaagggagaaaggcggacaggtatccggtaagcggcagggtcggaacaggagagcgcacgagggagcttccagggggaaacgcctggtatctttatagtcctgtcgggtttcgccacctctgacttgagcgtcgatttttgtgatgctcgtcaggggggcggagcctatggaaaaacgccagcaacgcggcctttttacggttcctggccttttgctggccttttgctcacatgttctttcctgcgttatcccctgattctgtggataaccgtattaccgcctttgagtgagctgataccgctcgccgcagccgaacgaccgagcgcagcgagtcagtgagcgaggaagcggaagagcgcccaatacgcaaaccgcctctccccgcgcgttggccgattcattaatgcagctggcacgacaggtttcccgactggaaagcgggcagtgagcgcaacgcaattaatgtgagttagctcactcattaggcaccccaggctttacactttatgcttccggctcgtatgttgtgtggaattgtgagcggataacaatttcacacaggaaacagctatgaccatgattacaccaagcttgcatgcaggcctatccgtagatgtacctggacatccaggtgatgccggcggcggtggtggaggcgcgcggaaagtcgcggacgcggttccagatgttgcgcagcggcaaaaagtgctccatggtcgggacgctctggccggtgaggcgtgcgcagtcgttgacgctctagaccgtgcaaaaggagagcctgtaagcgggcactcttccgtggtctggtggataaattcgcaagggtatcatggcggacgaccggggttcgaaccccggatccggccgtccgccgtgatccatgcggttaccgcccgcgtgtcgaacccaggtgtgcgacgtcagacaacgggggagcgctccttttggcttccttccaggcgcggcggctgctgcgctagcttttttggccactggccgcgcgcggcgtaagcggttaggctggaaagcgaaagcattaagtggctcgctccctgtagccggagggttattttccaagggttgagtcgcaggacccccggttcgagtctcgggccggccggactgcggcgaacgggggtttgcctccccgtcatgcaagaccccgcttgcaaattcctccggaaacagggacgagccccttttttgcttttcccagatgcatccggtgctgcggcagatgcgcccccctcctcagcagcggcaagagcaagagcagcggcagacatgcagggcaccctccccttctcctaccgcgtcaggaggggcaacatcgatccagacatgataagatacattgatgagtttggacaaaccacaactagaatgcagtgaaaaaaatgctttatttgtgaaatttgtgatgctattgctttatttgtaaccattataagctgcaataaacaagtttgtacactctcgggtgattatttacccccacccttgccgtctgcgccgtttaaaaatcaaaggggttctgccgcgcatcgctatgcgccactggcagggacacgttgcgatactggtgtttagtgctccacttaaactcaggcacaaccatccgcggcagctcggtgaagttttcactccacaggctgcgcaccatcaccaacgcgtttagcaggtcgggcgccgatatcttgaagtcgcagttggggcctccgccctgcgcgcgcgagttgcgatacacagggttgcagcactggaacactatcagcgccgggtggtgcacgctggccagcacgctcttgtcggagatcagatccgcgtccaggtcctccgcgttgctcagggcgaacggagtcaactttggtagctgccttcccaaaaagggcgcgtgcccaggctttgagttgcactcgcaccgtagtggcatcaaaaggtgaccgtgcccggtctgggcgttaggatacagcgcctgcataaaagccttgatctgcttaaaagccacctgagcctttgcgccttcagagaagaacatgccgcaagacttgccggaaaactgattggccggacaggccgcgtcgtgcacgcagcaccttgcgtcggtgttggagatctgcaccacatttcggccccaccggttcttcacgatcttggccttgctagactgctccttcagcgcgcgctgcccgttttcgctcgtcacatccatttcaatcacgtgctccttatttatcataatgcttccgtgtagacacttaagctcgccttcgatctcagcgcagcggtgcagccacaacgcgcagcccgtgggctcgtgatgcttgtaggtcacctctgcaaacgactgcaggtacgcctgcaggaatcgccccatcatcgtcacaaaggtcttgttgctggtgaaggtcagctgcaacccgcggtgctcctcgttcagccaggtcttgcatacggccgccagagcttccacttggtcaggcagtagtttgaagttcgcctttagatcgttatccacgtggtacttgtccatcagcgcgcgcgcagcctccatgcccttctcccacgcagacacgatcggcacactcagcgggttcatcaccgtaatttcactttccgcttcgctgggctcttcctcttcctcttgcgtccgcataccacgcgccactgggtcgtcttcattcagccgccgcactgtgcgcttacctcctttgccatgcttgattagcaccggtgggttgctgaaacccaccatttgtagcgccacatcttctctttcttcctcgctgtccacgattacctctggtgatggcgggcgctcgggcttgggagaagggcgcttctttttcttcttgggcgcaatggccaaatccgccgccgaggtcgatggccgcgggctgggtgtgcgcggcaccagcgcgtcttgtgatgagtcttcctcgtcctcggactcgatacgccgcctcatccgcttttttgggggcgcccggggaggcggcggcgacggggacggggacgacacgtcctccatggttgggggacgtcgcgccgcaccgcgtccgcgctcgggggtggtttcgcgctgctcctcttcccgactggccatttccttctcctataggcagaaaaagatcatggagtcagtcgagaagaaggacagcctaaccgccccctctgagttcgccaccaccgcctccaccgatgccgccaacgcgcctaccaccttccccgtcgaggcacccccgcttgaggaggaggaagtgattatcgagcaggacccaggttttgtaagcgaagacgacgaggaccgctcagtaccaacagaggataaaaagcaagaccaggacaacgcagaggcaaacgaggaacaagtcgggcggggggacgaaaggcatggcgactacctagatgtgggagacgacgtgctgttgaagcatctgcagcgccagtgcgccattatctgcgacgcgttgcaagagcgcagcgatgtgcccctcgccatagcggatgtcagccttgcctacgaacgccacctattctcaccgcgcgtaccccccaaacgccaagaaaacggcacatgcgagcccaacccgcgcctcaacttctaccccgtatttgccgtgccagaggtgcttgccacctatcacatctttttccaaaactgcaagatacccctatcctgccgtgccaaccgcagccgagcggacaagcagctggccttgcggcagggcgctgtcatacctgatatcgcctcgctcaacgaagtgccaaaaatctttgagggtcttggacgcgacgagaagcgcgcggcaaacgctctgcaacaggaaaacagcgaaaatgaaagtcactctggagtgttggtggaactcgagggtgacaacgcgcgcctagccgtactaaaacgcagcatcgaggtcacccactttgcctacccggcacttaacctaccccccaaggtcatgagcacagtcatgagtgagctgatcgtgcgccgtgcgcagcccctggagagggatgcaaatttgcaagaacaaacagaggagggcctacccgcagttggcgacgagcagctagcgcgctggcttcaaacgcgcgagcctgcccttgaaggacctatggacggccttcaacgagcgctccgtggccgcgcacctggcggacatcattttccccgaacgcctgcttaaaaccctgcaacagggtctgccagacttcaccagtcaaagcatgttgcagaactttaggaactttatcctagagcgctcaggaatcttgcccgccacctgctgtgcacttcctagcgactttgtgcccattaagtaccgcgaatgccctccgccgctttggggccactgctaccttctgcagctagccaactaccttgcctaccactctgacataatggaagacgtgagcggtgacggtctactggagtgtcactgtcgctgcaacctatgcaccccgcaccgctccctggtttgcaattcgcagctgcttaacgaaagtcaaattatcggtacctttgagctgcagggtccctcgcctgacgaaaagtccgcggctccggggttgaaactcactccggggctgtggacgtcggcttaccttcgcaaatttgtacctgaggactaccacgcccacgagattaggttctacgaagaccaatcccgcccgcctaatgcggagcttaccgcctgcgtcattacccagggccacattcttggccaattgcaagccatcaacaaagcccgccaagagtttctgctacgaaagggacggggggtttacttggacccccagtccggcgaggagctcaacccaatccccccgccgccgcagccctatcagcagcagccgcgggcccttgcttcccaggatggcacccaaaaagaagctgcagctgccgccgccacccacggacgaggaggaatactgggacagtcaggcagaggaggttttggacgaggaggaggaggacatgatggaagactgggagagcctagacgaggaagcttccgaggtcgaagaggtgtcagacgaaacaccgtcaccctcggtcgcattcccctcgccggcgccccagaaatcggcaaccggttccagcatggctacaacctccgctcctcaggcgccgccggcactgcccgttcgccgacccaaccgtagatgggacaccactggaaccagggccggtaagtccaagcagccgccgccgttagcccaagagcaacaacagcgccaaggctaccgctcatggcgcgggcacaagaacgccatagttgcttgcttgcaagactgtgggggcaacatctccttcgcccgccgctttcttctctaccatcacggcgtggccttcccccgtaacatcctgcattactaccgtcatctctacagcccatactgcaccggcggcagcggcagcaacagcagcggccacacagaagcaaaggcgaccggatagcaagactctgacaaagcccaagaaatccacagcggcggcagcagcaggaggaggagcgctgcgtctggcgcccaacgaacccgtatcgacccgcgagcttagaaacaggatttttcccactctgtatgctatatttcaacagagcaggggccaagaacaagagctgaaaataaaaaacaggtctctgcgatccctcacccgcagctgcctgtatcacaaaagcgaagatcagcttcggcgcacgctggaagacgcggaggctctcttcagtaaatactgcgcgctgactcttaaggactagtttcgcgccctttctcaaatttaagcgcgaaaactacgtcatctccagcggccacacccggcgccagcacctgttgtcagcgccattatgagcaaggaaattcccacgccctacatgtggagttaccagccacaaatgggacttgcggctggagctgcccaagactactcaacccgaataaactacatgagcgcggggcggccgccgtttgtgttatgtttcaacgtgtttatttttcaattgcagaaaatttcaagtcatttttcattcagtagtatagccccaccaccacatagcttatacagatcaccgtaccttaatcaaactcacagaaccctagtattcaacctgccacctccctcccaacacacagagtacacagtcctttctccccggctggccttaaaaagcatcatatcatgggtaacagacatattcttaggtgttatattccacacggtttcctgtcgagccaaacgctcatcagtgatattaataaactccccgggcagctcacttaagttcatgtcgctgtccagctgctgagccacaggctgctgtccaacttgcggttgcttaacgggcggcgaaggagaagtccacgcctacatgggggtagagtcataatcgtgcatcaggatagggcggtggtgctgcagcagcgcgcgaataaactgctgccgccgccgctccgtcctgcaggaatacaacatggcagtggtctcctcagcgatgattcgcaccgcccgcagcataaggcgccttgtcctccgggcacagcagcgcaccctgatctcacttaaatcagcacagtaactgcagcacagcaccacaatattgttcaaaatcccacagtgcaaggcgctgtatccaaagctcatggcggggaccacagaacccacgtggccatcataccacaagcgcaggtagattaagtggcgacccctcataaacacgctggacataaacattacctcttttggcatgttgtaattcaccacctcccggtaccatataaacctctgattaaacatggcgccatccaccaccatcctaaaccagctggccaaaacctgcccgccggctatacactgcagggaaccgggactggaacaatgacagtggagagcccaggactcgtaaccatggatcatcatgctcgtcatgatatcaatgttggcacaacacaggcacacgtgcatacacttcctcaggattacaagctcctcccgcgttagaaccatatcccagggaacaacccattcctgaatcagcgtaaatcccacactgcagggaagacctcgcacgtaactcacgttgtgcattgtcaaagtgttacattcgggcagcagcggatgatcctccagtatggtagcgcgggtttctgtctcaaaaggaggtagacgatccctactgtacggagtgcgccgagacaaccgagatcgtgttggtcgtagtgtcatgccaaatggaacgccggacgtagtcatatttcctgaagcaaaaccaggtgcgggcgtgacaaacagatctgcgtctccggtctcgccgcttagatcgctctgtgtagtagttgtagtatatccactctctcaaagcatccaggcgccccctggcttcgggttctatgtaaactccttcatgcgccgctgccctgataacatccaccaccgcagaataagccacacccagccaacctacacattcgttctgcgagtcacacacgggaggagcgggaagagctggaagaaccatgtttttttttttattccaaaagattatccaaaacctcaaaatgaagatctattaagtgaacgcgctcccctccggtggcgtggtcaaactctacagccaaagaacagataatggcatttgtaagatgttgcacaatggcttccaaaaggcaaacggccctcacgtccaagtggacgtaaaggctaaacccttcagggtgaatctcctctataaacattccagcaccttcaaccatgcccaaataattctcatctcgccaccttctcaatatatctctaagcaaatcccgaatattaagtccggccattgtaaaaatctgctccagagcgccctccaccttcagcctcaagcagcgaatcatgattgcaaaaattcaggttcctcacagacctgtataagattcaaaagcggaacattaacaaaaataccgcgatcccgtaggtcccttcgcagggccagctgaacataatcgtgcaggtctgcacggaccagcgcggccacttccccgccaggaaccatgacaaaagaacccacactgattatgacacgcatactcggagctatgctaaccagcgtagccccgatgtaagcttgttgcatgggcggcgatataaaatgcaaggtgctgctcaaaaaatcaggcaaagcctcgcgcaaaaaagaaagcacatcgtagtcatgctcatgcagataaaggcaggtaagctccggaaccaccacagaaaaagacaccatttttctctcaaacatgtctgcgggtttctgcataaacacaaaataaaataacaaaaaaacatttaaacattagaagcctgtcttacaacaggaaaaacaacccttataagcataagacggactacggccatgccggcgtgaccgtaaaaaaactggtcaccgtgattaaaaagcaccaccgacagctcctcggtcatgtccggagtcataatgtaagactcggtaaacacatcaggttgattcacatcggtcagtgctaaaaagcgaccgaaatagcccgggggaatacatacccgcaggcgtagagacaacattacagcccccataggaggtataacaaaattaataggagagaaaaacacataaacacctgaaaaaccctcctgcctaggcaaaatagcaccctcccgctccagaacaacatacagcgcttccacagcggcagccataacagtcagccttaccagtaaaaaagaaaacctattaaaaaaacaccactcgacacggcaccagctcaatcagtcacagtgtaaaaaagggccaagtgcagagcgagtatatataggactaaaaaatgacgtaacggttaaagtccacaaaaaacacccagaaaaccgcacgcgaacctacgcccagaaacgaaagccaaaaaacccacaacttcctcaaatcgtcacttccgttttcccacgttacgtcacttcccattttaagaaaactacaattcccaacacatacaagttactccgcccttaattaaatcggatccgatatctagatgtattcgcgaggtaccgagctcgaattctctggccgtcgttttacaacgtcgtgactgggaaaaccctggcgttacccaacttaatcgccttgcagcacatccccctttcgccagctggcgtaatagcgaagaggcccgcaccgatcgcccttcccaacagttgcgcagcctgaatggcgaatggcgcctgatgcggtattttctccttacgcatctgtgcggtatttcacaccgcatatggtgcactctcagtacaatctgctctgatgccgcatagttaagccagccccgacacccgccaacacccgctgacgcgccctgacgggcttgtctgctcccggcatccgcttacagacaagctgtgaccgtctccgggagctgcatgtgtcagaggttttcaccgtcatcaccgaaacgcgcga

SEQ ID NO: 82 - DNA, 10027 bp, synthetic construct
  source 1..10027: mol_type = other DNA
tgcagctctggcccgtgtctcaaaatctctgatgttacattgcacaagataaaaatatatcatcatgaacaataaaactgtctgcttacataaacagtaatacaaggggtgttatgagccatattcaacgggaaacgtcgaggccgcgattaaattccaacatggatgctgatttatatgggtataaatgggctcgcgataatgtcgggcaatcaggtgcgacaatctatcgcttgtatgggaagcccgatgcgccagagttgtttctgaaacatggcaaaggtagcgttgccaatgatgttacagatgagatggtcagactaaactggctgacggaatttatgcctcttccgaccatcaagcattttatccgtactcctgatgatgcatggttactcaccactgcgatccccggaaaaacagcattccaggtattagaagaatatcctgattcaggtgaaaatattgttgatgcgctggcagtgttcctgcgccggttgcattcgattcctgtttgtaattgtccttttaacagcgatcgcgtatttcgtctcgctcaggcgcaatcacgaatgaataacggtttggttgatgcgagtgattttgatgacgagcgtaatggctggcctgttgaacaagtctggaaagaaatgcataaacttttgccattctcaccggattcagtcgtcactcatggtgatttctcacttgataaccttatttttgacgaggggaaattaataggttgtattgatgttggacgagtcggaatcgcagaccgataccaggatcttgccatcctatggaactgcctcggtgagttttctccttcattacagaaacggctttttcaaaaatatggtattgataatcctgatatgaataaattgcagtttcatttgatgctcgatgagtttttctaatcagaattggttaattggttgtaacattattcagattgggcttgatttaaaacttcatttttaatttaaaaggatctaggtgaagatcctttttgataatctcatgaccaaaatcccttaacgtgagttttcgttccactgagcgtcagaccccgtagaaaagatcaaaggatcttcttgagatcctttttttctgcgcgtaatctgctgcttgcaaacaaaaaaaccaccgctaccagcggtggtttgtttgccggatcaagagctaccaactctttttccgaaggtaactggcttcagcagagcgcagataccaaatactgttcttctagtgtagccgtagttaggccaccacttcaagaactctgtagcaccgcctacatacctcgctctgctaatcctgttaccagtggctgctgccagtggcgataagtcgtgtcttaccgggttggactcaagacgatagttaccggataaggcgcagcggtcgggctgaacggggggttcgtgcacacagcccagcttggagcgaacgacctacaccgaactgagatacctacagcgtgagctatgagaaagcgccacgcttcccgaagggagaaaggcggacaggtatccggtaagcggcagggtcggaacaggagagcgcacgagggagcttccagggggaaacgcctggtatctttatagtcctgtcgggtttcgccacctctgacttgagcgtcgatttttgtgatgctcgtcaggggggcggagcctatggaaaaacgccagcaacgcggcctttttacggttcctggccttttgctggccttttgctcacatgttctttcctgcgttatcccctgattctgtggataaccgtattaccgcctttgagtgagctgataccgctcgccgcagccgaacgaccgagcgcagcgagtcagtgagcgaggaagcggaagagcgcccaatacgcaaaccgcctctccccgcgcgttggccgattcattaatgcagctggcacgacaggtttcccgactggaaagcgggcagtgagcgcaacgcaattaatgtgagttagctcactcattaggcaccccaggctttacactttatgcttccggctcgtatgttgtgtggaattgtgagcggataacaatttcacacaggaaacagctatgaccatgattacaccaagcttgcatgcaggcctatccgtagatgtacctggacatccaggtgatgccggcggcggtggtggaggcgcgcggaaagtcgcggacgcggttccagatgttgcgcagcggcaaaaagtgctccatggtcgggacgctctggccggtgaggcgtgcgcagtcgttgacgctctagaccgtgcaaaaggagagcctgtaagcgggcactcttccgtggtctggtggataaattcgcaagggtatcatggcggacgaccggggttcgaaccccggatccggccgtccgccgtgatccatgcggttaccgcccgcgtgtcgaacccaggtgtgcgacgtcagacaacgggggagcgctccttttggcttccttccaggcgcggcggctgctgcgctagcttttttggccactggccgcgcgcggcgtaagcggttaggctggaaagcgaaagcattaagtggctcgctccctgtagccggagggttattttccaagggttgagtcgcaggacccccggttcgagtctcgggccggccggactgcggcgaacgggggtttgcctccccgtcatgcaagaccccgcttgcaaattcctccggaaacagggacgagccccttttttgcttttcccagatgcatccggtgctgcggcagatgcgcccccctcctcagcagcggcaagagcaagagcagcggcagacatgcagggcaccctccccttctcctaccgcgtcaggaggggcaacatcgatccagacatgataagatacattgatgagtttggacaaaccacaactagaatgcagtgaaaaaaatgctttatttgtgaaatttgtgatgctattgctttatttgtaaccattataagctgcaataaacaagtttgtacactctcgggtgattatttacccccacccttgccgtctgcgccgtttaaaaatcaaaggggttctgccgcgcatcgctatgcgccactggcagggacacgttgcgatactggtgtttagtgctccacttaaactcaggcacaaccatccgcggcagctcggtgaagttttcactccacaggctgcgcaccatcaccaacgcgtttagcaggtcgggcgccgatatcttgaagtcgcagttggggcctccgccctgcgcgcgcgagttgcgatacacagggttgcagcactggaacactatcagcgccgggtggtgcacgctggccagcacgctcttgtcggagatcagatccgcgtccaggtcctccgcgttgctcagggcgaacggagtcaactttggtagctgccttcccaaaaagggcgcgtgcccaggctttgagttgcactcgcaccgtagtggcatcaaaaggtgaccgtgcccggtctgggcgttaggatacagcgcctgcataaaagccttgatctgcttaaaagccacctgagcctttgcgccttcagagaagaacatgccgcaagacttgccggaaaactgattggccggacaggccgcgtcgtgcacgcagcaccttgcgtcggtgttggagatctgcaccacatttcggccccaccggttcttcacgatcttggccttgctagactgctccttcagcgcgcgctgcccgttttcgctcgtcacatccatttcaatcacgtgctccttatttatcataatgcttccgtgtagacacttaagctcgccttcgatctcagcgcagcggtgcagccacaacgcgcagcccgtgggctcgtgatgcttgtaggtcacctctgcaaacgactgcaggtacgcctgcaggaatcgccccatcatcgtcacaaaggtcttgttgctggtgaaggtcagctgcaacccgcggtgctcctcgttcagccaggtcttgcatacggccgccagagcttccacttggtcaggcagtagtttgaagttcgcctttagatcgttatccacgtggtacttgtccatcagcgcgcgcgcagcctccatgcccttctcccacgcagacacgatcggcacactcagcgggttcatcaccgtaatttcactttccgcttcgctgggctcttcctcttcctcttgcgtccgcataccacgcgccactgggtcgtcttcattcagccgccgcactgtgcgcttacctcctttgccatgcttgattagcaccggtgggttgctgaaacccaccatttgtagcgccacatcttctctttcttcctcgctgtccacgattacctctggtgatggcgggcgctcgggcttgggagaagggcgcttctttttcttcttgggcgcaatggccaaatccgccgccgaggtcgatggccgcgggctgggtgtgcgcggcaccagcgcgtcttgtgatgagtcttcctcgtcctcggactcgatacgccgcctcatccgcttttttgggggcgcccggggaggcggcggcgacggggacggggacgacacgtcctccatggttgggggacgtcgcgccgcaccgcgtccgcgctcgggggtggtttcgcgctgctcctcttcccgactggccatttccttctcctataggcagaaaaagatcatggagtcagtcgagaagaaggcttgaaggacctatggacggccttcaacgagcgctccgtggccgcgcacctggcggacatcattttccccgaacgcctgcttaaaaccctgcaacagggtctgccagacttcaccagtcaaagcatgttgcagaactttaggaactttatcctagagcgctcaggaatcttgcccgccacctgctgtgcacttcctagcgactttgtgcccattaagtaccgcgaatgccctccgccgctttggggccactgctaccttctgcagctagccaactaccttgcctaccactctgacataatggaagacgtgagcggtgacggtctactggagtgtcactgtcgctgcaacctatgcaccccgcaccgctccctggtttgcaattcgcagctgcttaacgaaagtcaaattatcggtacctttgagctgcagggtccctcgcctgacgaaaagtccgcggctccggggttgaaactcactccggggctgtggacgtcggcttaccttcgcaaatttgtacctgaggactaccacgcccacgagattaggttctacgaagaccaatcccgcccgcctaatgcggagcttaccgcctgcgtcattacccagggccacattcttggccaattgcaagccatcaacaaagcccgccaagagtttctgctacgaaagggacggggggtttacttggacccccagtccggcgaggagctcaacccaatccccccgccgccgcagccctatcagcagcagccgcgggcccttgcttcccaggatggcacccaaaaagaagctgcagctgccgccgccacccacggacgaggaggaatactgggacagtcaggcagaggaggttttggacgaggaggaggaggacatgatggaagactgggagagcctagacgaggaagcttccgaggtcgaagaggtgtcagacgaaacaccgtcaccctcggtcgcattcccctcgccggcgccccagaaatcggcaaccggttccagcatggctacaacctccgctcctcaggcgccgccggcactgcccgttcgccgacccaaccgtagatgggacaccactggaaccagggccggtaagtccaagcagccgccgccgttagcccaagagcaacaacagcgccaaggctaccgctcatggcgcgggcacaagaacgccatagttgcttgcttgcaagactgtgggggcaacatctccttcgcccgccgctttcttctctaccatcacggcgtggccttcccccgtaacatcctgcattactaccgtcatctctacagcccatactgcaccggcggcagcggcagcaacagcagcggccacacagaagcaaaggcgaccggatagcaagactctgacaaagcccaagaaatccacagcggcggcagcagcaggaggaggagcgctgcgtctggcgcccaacgaacccgtatcgacccgcgagcttagaaacaggatttttcccactctgtatgctatatttcaacagagcaggggccaagaacaagagctgaaaataaaaaacaggtctctgcgatccctcacccgcagctgcctgtatcacaaaagcgaagatcagcttcggcgcacgctggaagacgcggaggctctcttcagtaaatactgcgcgctgactcttaaggactagtttcgcgccctttctcaaatttaagcgcgaaaactacgtcatctccagcggccacacccggcgccagcacctgttgtcagcgccattatgagcaaggaaattcccacgccctacatgtggagttaccagccacaaatgggacttgcggctggagctgcccaagactactcaacccgaataaactacatgagcgcggggcggccgccgtttgtgttatgtttcaacgtgtttatttttcaattgcagaaaatttcaagtcatttttcattcagtagtatagccccaccaccacatagcttatacagatcaccgtaccttaatcaaactcacagaaccctagtattcaacctgccacctccctcccaacacacagagtacacagtcctttctccccggctggccttaaaaagcatcatatcatgggtaacagacatattcttaggtgttatattccacacggtttcctgtcgagccaaacgctcatcagtgatattaataaactccccgggcagctcacttaagttcatgtcgctgtccagctgctgagccacaggctgctgtccaacttgcggttgcttaacgggcggcgaaggagaagtccacgcctacatgggggtagagtcataatcgtgcatcaggatagggcggtggtgctgcagcagcgcgcgaataaactgctgccgccgccgctccgtcctgcaggaatacaacatggcagtggtctcctcagcgatgattcgcaccgcccgcagcataaggcgccttgtcctccgggcacagcagcgcaccctgatctcacttaaatcagcacagtaactgcagcacagcaccacaatattgttcaaaatcccacagtgcaaggcgctgtatccaaagctcatggcggggaccacagaacccacgtggccatcataccacaagcgcaggtagattaagtggcgacccctcataaacacgctggacataaacattacctcttttggcatgttgtaattcaccacctcccggtaccatataaacctctgattaaacatggcgccatccaccaccatcctaaaccagctggccaaaacctgcccgccggctatacactgcagggaaccgggactggaacaatgacagtggagagcccaggactcgtaaccatggatcatcatgctcgtcatgatatcaatgttggcacaacacaggcacacgtgcatacacttcctcaggattacaagctcctcccgcgttagaaccatatcccagggaacaacccattcctgaatcagcgtaaatcccacactgcagggaagacctcgcacgtaactcacgttgtgcattgtcaaagtgttacattcgggcagcagcggatgatcctccagtatggtagcgcgggtttctgtctcaaaaggaggtagacgatccctactgtacggagtgcgccgagacaaccgagatcgtgttggtcgtagtgtcatgccaaatggaacgccggacgtagtcatatttcctgaagcaaaaccaggtgcgggcgtgacaaacagatctgcgtctccggtctcgccgcttagatcgctctgtgtagtagttgtagtatatccactctctcaaagcatccaggcgccccctggcttcgggttctatgtaaactccttcatgcgccgctgccctgataacatccaccaccgcagaataagccacacccagccaacctacacattcgttctgcgagtcacacacgggaggagcgggaagagctggaagaaccatgtttttttttttattccaaaagattatccaaaacctcaaaatgaagatctattaagtgaacgcgctcccctccggtggcgtggtcaaactctacagccaaagaacagataatggcatttgtaagatgttgcacaatggcttccaaaaggcaaacggccctcacgtccaagtggacgtaaaggctaaacccttcagggtgaatctcctctataaacattccagcaccttcaaccatgcccaaataattctcatctcgccaccttctcaatatatctctaagcaaatcccgaatattaagtccggccattgtaaaaatctgctccagagcgccctccaccttcagcctcaagcagcgaatcatgattgcaaaaattcaggttcctcacagacctgtataagattcaaaagcggaacattaacaaaaataccgcgatcccgtaggtcccttcgcagggccagctgaacataatcgtgcaggtctgcacggaccagcgcggccacttccccgccaggaaccatgacaaaagaacccacactgattatgacacgcatactcggagctatgctaaccagcgtagccccgatgtaagcttgttgcatgggcggcgatataaaatgcaaggtgctgctcaaaaaatcaggcaaagcctcgcgcaaaaaagaaagcacatcgtagtcatgctcatgcagataaaggcaggtaagctccggaaccaccacagaaaaagacaccatttttctctcaaacatgtctgcgggtttctgcataaacacaaaataaaataacaaaaaaacatttaaacattagaagcctgtcttacaacaggaaaaacaacccttataagcataagacggactacggccatgccggcgtgaccgtaaaaaaactggtcaccgtgattaaaaagcaccaccgacagctcctcggtcatgtccggagtcataatgtaagactcggtaaacacatcaggttgattcacatcggtcagtgctaaaaagcgaccgaaatagcccgggggaatacatacccgcaggcgtagagacaacattacagcccccataggaggtataacaaaattaataggagagaaaaacacataaacacctgaaaaaccctcctgcctaggcaaaatagcaccctcccgctccagaacaacatacagcgcttccacagcggcagccataacagtcagccttaccagtaaaaaagaaaacctattaaaaaaacaccactcgacacggcaccagctcaatcagtcacagtgtaaaaaagggccaagtgcagagcgagtatatataggactaaaaaatgacgtaacggttaaagtccacaaaaaacacccagaaaaccgcacgcgaacctacgcccagaaacgaaagccaaaaaacccacaacttcctcaaatcgtcacttccgttttcccacgttacgtcacttcccattttaagaaaactacaattcccaacacatacaagttactccgcccttaattaaatcggatccgatatctagatgtattcgcgaggtaccgagctcgaattctctggccgtcgttttacaacgtcgtgactgggaaaaccctggcgttacccaacttaatcgccttgcagcacatccccctttcgccagctggcgtaatagcgaagaggcccgcaccgatcgcccttcccaacagttgcgcagcctgaatggcgaatggcgcctgatgcggtattttctccttacgcatctgtgcggtatttcacaccgcatatggtgcactctcagtacaatctgctctgatgccgcatagttaagccagccccgacacccgccaacacccgctgacgcgccctgacgggcttgtctgctcccggcatccgcttacagacaagctgtgaccgtctccgggagctgcatgtgtcagaggttttcaccgtcatcaccgaaacgcgcga

SEQ ID NO: 83 - DNA, 10033 bp, synthetic construct
  source 1..10033: mol_type = other DNA
tgcagctctggcccgtgtctcaaaatctctgatgttacattgcacaagataaaaatatatcatcatgaacaataaaactgtctgcttacataaacagtaatacaaggggtgttatgagccatattcaacgggaaacgtcgaggccgcgattaaattccaacatggatgctgatttatatgggtataaatgggctcgcgataatgtcgggcaatcaggtgcgacaatctatcgcttgtatgggaagcccgatgcgccagagttgtttctgaaacatggcaaaggtagcgttgccaatgatgttacagatgagatggtcagactaaactggctgacggaatttatgcctcttccgaccatcaagcattttatccgtactcctgatgatgcatggttactcaccactgcgatccccggaaaaacagcattccaggtattagaagaatatcctgattcaggtgaaaatattgttgatgcgctggcagtgttcctgcgccggttgcattcgattcctgtttgtaattgtccttttaacagcgatcgcgtatttcgtctcgctcaggcgcaatcacgaatgaataacggtttggttgatgcgagtgattttgatgacgagcgtaatggctggcctgttgaacaagtctggaaagaaatgcataaacttttgccattctcaccggattcagtcgtcactcatggtgatttctcacttgataaccttatttttgacgaggggaaattaataggttgtattgatgttggacgagtcggaatcgcagaccgataccaggatcttgccatcctatggaactgcctcggtgagttttctccttcattacagaaacggctttttcaaaaatatggtattgataatcctgatatgaataaattgcagtttcatttgatgctcgatgagtttttctaatcagaattggttaattggttgtaacattattcagattgggcttgatttaaaacttcatttttaatttaaaaggatctaggtgaagatcctttttgataatctcatgaccaaaatcccttaacgtgagttttcgttccactgagcgtcagaccccgtagaaaagatcaaaggatcttcttgagatcctttttttctgcgcgtaatctgctgcttgcaaacaaaaaaaccaccgctaccagcggtggtttgtttgccggatcaagagctaccaactctttttccgaaggtaactggcttcagcagagcgcagataccaaatactgttcttctagtgtagccgtagttaggccaccacttcaagaactctgtagcaccgcctacatacctcgctctgctaatcctgttaccagtggctgctgccagtggcgataagtcgtgtcttaccgggttggactcaagacgatagttaccggataaggcgcagcggtcgggctgaacggggggttcgtgcacacagcccagcttggagcgaacgacctacaccgaactgagatacctacagcgtgagctatgagaaagcgccacgcttcccgaagggagaaaggcggacaggtatccggtaagcggcagggtcggaacaggagagcgcacgagggagcttccagggggaaacgcctggtatctttatagtcctgtcgggtttcgccacctctgacttgagcgtcgatttttgtgatgctcgtcaggggggcggagcctatggaaaaacgccagcaacgcggcctttttacggttcctggccttttgctggccttttgctcacatgttctttcctgcgttatcccctgattctgtggataaccgtattaccgcctttgagtgagctgataccgctcgccgcagccgaacgaccgagcgcagcgagtcagtgagcgaggaagcggaagagcgcccaatacgcaaaccgcctctccccgcgcgttggccgattcattaatgcagctggcacgacaggtttcccgactggaaagcgggcagtgagcgcaacgcaattaatgtgagttagctcactcattaggcaccccaggctttacactttatgcttccggctcgtatgttgtgtggaattgtgagcggataacaatttcacacaggaaacagctatgaccatgattacaccaagcttgcatgcaggcctatccgtagatgtacctggacatccaggtgatgccggcggcggtggtggaggcgcgcggaaagtcgcggacgcggttccagatgttgcgcagcggcaaaaagtgctccatggtcgggacgctctggccggtgaggcgtgcgcagtcgttgacgctctagaccgtgcaaaaggagagcctgtaagcgggcactcttccgtggtctggtggataaattcgcaagggtatcatggcggacgaccggggttcgaaccccggatccggccgtccgccgtgatccatgcggttaccgcccgcgtgtcgaacccaggtgtgcgacgtcagacaacgggggagcgctccttttggcttccttccaggcgcggcggctgctgcgctagcttttttggccactggccgcgcgcggcgtaagcggttaggctggaaagcgaaagcattaagtggctcgctccctgtagccggagggttattttccaagggttgagtcgcaggacccccggttcgagtctcgggccggccggactgcggcgaacgggggtttgcctccccgtcatgcaagaccccgcttgcaaattcctccggaaacagggacgagccccttttttgcttttcccagatgcatccggtgctgcggcagatgcgcccccctcctcagcagcggcaagagcaagagcagcggcagacatgcagggcaccctccccttctcctaccgcgtcaggaggggcaacatcgatccagacatgataagatacattgatgagtttggacaaaccacaactagaatgcagtgaaaaaaatgctttatttgtgaaatttgtgatgctattgctttatttgtaaccattataagctgcaataaacaagtttgtacactctcgggtgattatttacccccacccttgccgtctgcgccgtttaaaaatcaaaggggttctgccgcgcatcgctatgcgccactggcagggacacgttgcgatactggtgtttagtgctccacttaaactcaggcacaaccatccgcggcagctcggtgaagttttcactccacaggctgcgcaccatcaccaacgcgtttagcaggtcgggcgccgatatcttgaagtcgcagttggggcctccgccctgcgcgcgcgagttgcgatacacagggttgcagcactggaacactatcagcgccgggtggtgcacgctggccagcacgctcttgtcggagatcagatccgcgtccaggtcctccgcgttgctcagggcgaacggagtcaactttggtagctgccttcccaaaaagggcgcgtgcccaggctttgagttgcactcgcaccgtagtggcatcaaaaggtgaccgtgcccggtctgggcgttaggatacagcgcctgcataaaagccttgatctgcttaaaagccacctgagcctttgcgccttcagagaagaacatgccgcaagacttgccggaaaactgattggccggacaggccgcgtcgtgcacgcagcaccttgcgtcggtgttggagatctgcaccacatttcggccccaccggttcttcacgatcttggccttgctagactgctccttcagcgcgcgctgcccgttttcgctcgtcacatccatttcaatcacgtgctccttatttatcataatgcttccgtgtagacacttaagctcgccttcgatctcagcgcagcggtgcagccacaacgcgcagcccgtgggctcgtgatgcttgtaggtcacctctgcaaacgactgcaggtacgcctgcaggaatcgccccatcatcgtcacaaaggtcttgttgctggtgaaggtcagctgcaacccgcggtgctcctcgttcagccaggtcttgcatacggccgccagagcttccacttggtcaggcagtagtttgaagttcgcctttagatcgttatccacgtggtacttgtccatcagcgcgcgcgcagcctccatgcccttctcccacgcagacacgatcggcacactcagcgggttcatcaccgtaatttcactttccgcttcgctgggctcttcctcttcctcttgcgtccgcataccacgcgccactgggtcgtcttcattcagccgccgcactgtgcgcttacctcctttgccatgcttgattagcaccggtgggttgctgaaacccaccatttgtagcgccacatcttctctttcttcctcgctgtccacgattacctctggtgatggcgggcgctcgggcttgggagaagggcgcttctttttcttcttgggcgcaatggccaaatccgccgccgaggtcgatggccgcgggctgggtgtgcgcggcaccagcgcgtcttgtgatgagtcttcctcgtcctcggactcgatacgccgcctcatccgcttttttgggggcgcccggggaggcggcggcgacggggacggggacgacacgtcctccatggttgggggacgtcgcgccgcaccgcgtccgcgctcgggggtggtttcgcgctgctcctcttcccgactggccatggtggcttccttctcctataggcagaaaaagatcatggagtcagtcgagaagaaggcttgaaggacctatggacggccttcaacgagcgctccgtggccgcgcacctggcggacatcattttccccgaacgcctgcttaaaaccctgcaacagggtctgccagacttcaccagtcaaagcatgttgcagaactttaggaactttatcctagagcgctcaggaatcttgcccgccacctgctgtgcacttcctagcgactttgtgcccattaagtaccgcgaatgccctccgccgctttggggccactgctaccttctgcagctagccaactaccttgcctaccactctgacataatggaagacgtgagcggtgacggtctactggagtgtcactgtcgctgcaacctatgcaccccgcaccgctccctggtttgcaattcgcagctgcttaacgaaagtcaaattatcggtacctttgagctgcagggtccctcgcctgacgaaaagtccgcggctccggggttgaaactcactccggggctgtggacgtcggcttaccttcgcaaatttgtacctgaggactaccacgcccacgagattaggttctacgaagaccaatcccgcccgcctaatgcggagcttaccgcctgcgtcattacccagggccacattcttggccaattgcaagccatcaacaaagcccgccaagagtttctgctacgaaagggacggggggtttacttggacccccagtccggcgaggagctcaacccaatccccccgccgccgcagccctatcagcagcagccgcgggcccttgcttcccaggatggcacccaaaaagaagctgcagctgccgccgccacccacggacgaggaggaatactgggacagtcaggcagaggaggttttggacgaggaggaggaggacatgatggaagactgggagagcctagacgaggaagcttccgaggtcgaagaggtgtcagacgaaacaccgtcaccctcggtcgcattcccctcgccggcgccccagaaatcggcaaccggttccagcatggctacaacctccgctcctcaggcgccgccggcactgcccgttcgccgacccaaccgtagatgggacaccactggaaccagggccggtaagtccaagcagccgccgccgttagcccaagagcaacaacagcgccaaggctaccgctcatggcgcgggcacaagaacgccatagttgcttgcttgcaagactgtgggggcaacatctccttcgcccgccgctttcttctctaccatcacggcgtggccttcccccgtaacatcctgcattactaccgtcatctctacagcccatactgcaccggcggcagcggcagcaacagcagcggccacacagaagcaaaggcgaccggatagcaagactctgacaaagcccaagaaatccacagcggcggcagcagcaggaggaggagcgctgcgtctggcgcccaacgaacccgtatcgacccgcgagcttagaaacaggatttttcccactctgtatgctatatttcaacagagcaggggccaagaacaagagctgaaaataaaaaacaggtctctgcgatccctcacccgcagctgcctgtatcacaaaagcgaagatcagcttcggcgcacgctggaagacgcggaggctctcttcagtaaatactgcgcgctgactcttaaggactagtttcgcgccctttctcaaatttaagcgcgaaaactacgtcatctccagcggccacacccggcgccagcacctgttgtcagcgccattatgagcaaggaaattcccacgccctacatgtggagttaccagccacaaatgggacttgcggctggagctgcccaagactactcaacccgaataaactacatgagcgcggggcggccgccgtttgtgttatgtttcaacgtgtttatttttcaattgcagaaaatttcaagtcatttttcattcagtagtatagccccaccaccacatagcttatacagatcaccgtaccttaatcaaactcacagaaccctagtattcaacctgccacctccctcccaacacacagagtacacagtcctttctccccggctggccttaaaaagcatcatatcatgggtaacagacatattcttaggtgttatattccacacggtttcctgtcgagccaaacgctcatcagtgatattaataaactccccgggcagctcacttaagttcatgtcgctgtccagctgctgagccacaggctgctgtccaacttgcggttgcttaacgggcggcgaaggagaagtccacgcctacatgggggtagagtcataatcgtgcatcaggatagggcggtggtgctgcagcagcgcgcgaataaactgctgccgccgccgctccgtcctgcaggaatacaacatggcagtggtctcctcagcgatgattcgcaccgcccgcagcataaggcgccttgtcctccgggcacagcagcgcaccctgatctcacttaaatcagcacagtaactgcagcacagcaccacaatattgttcaaaatcccacagtgcaaggcgctgtatccaaagctcatggcggggaccacagaacccacgtggccatcataccacaagcgcaggtagattaagtggcgacccctcataaacacgctggacataaacattacctcttttggcatgttgtaattcaccacctcccggtaccatataaacctctgattaaacatggcgccatccaccaccatcctaaaccagctggccaaaacctgcccgccggctatacactgcagggaaccgggactggaacaatgacagtggagagcccaggactcgtaaccatggatcatcatgctcgtcatgatatcaatgttggcacaacacaggcacacgtgcatacacttcctcaggattacaagctcctcccgcgttagaaccatatcccagggaacaacccattcctgaatcagcgtaaatcccacactgcagggaagacctcgcacgtaactcacgttgtgcattgtcaaagtgttacattcgggcagcagcggatgatcctccagtatggtagcgcgggtttctgtctcaaaaggaggtagacgatccctactgtacggagtgcgccgagacaaccgagatcgtgttggtcgtagtgtcatgccaaatggaacgccggacgtagtcatatttcctgaagcaaaaccaggtgcgggcgtgacaaacagatctgcgtctccggtctcgccgcttagatcgctctgtgtagtagttgtagtatatccactctctcaaagcatccaggcgccccctggcttcgggttctatgtaaactccttcatgcgccgctgccctgataacatccaccaccgcagaataagccacacccagccaacctacacattcgttctgcgagtcacacacgggaggagcgggaagagctggaagaaccatgtttttttttttattccaaaagattatccaaaacctcaaaatgaagatctattaagtgaacgcgctcccctccggtggcgtggtcaaactctacagccaaagaacagataatggcatttgtaagatgttgcacaatggcttccaaaaggcaaacggccctcacgtccaagtggacgtaaaggctaaacccttcagggtgaatctcctctataaacattccagcaccttcaaccatgcccaaataattctcatctcgccaccttctcaatatatctctaagcaaatcccgaatattaagtccggccattgtaaaaatctgctccagagcgccctccaccttcagcctcaagcagcgaatcatgattgcaaaaattcaggttcctcacagacctgtataagattcaaaagcggaacattaacaaaaataccgcgatcccgtaggtcccttcgcagggccagctgaacataatcgtgcaggtctgcacggaccagcgcggccacttccccgccaggaaccatgacaaaagaacccacactgattatgacacgcatactcggagctatgctaaccagcgtagccccgatgtaagcttgttgcatgggcggcgatataaaatgcaaggtgctgctcaaaaaatcaggcaaagcctcgcgcaaaaaagaaagcacatcgtagtcatgctcatgcagataaaggcaggtaagctccggaaccaccacagaaaaagacaccatttttctctcaaacatgtctgcgggtttctgcataaacacaaaataaaataacaaaaaaacatttaaacattagaagcctgtcttacaacaggaaaaacaacccttataagcataagacggactacggccatgccggcgtgaccgtaaaaaaactggtcaccgtgattaaaaagcaccaccgacagctcctcggtcatgtccggagtcataatgtaagactcggtaaacacatcaggttgattcacatcggtcagtgctaaaaagcgaccgaaatagcccgggggaatacatacccgcaggcgtagagacaacattacagcccccataggaggtataacaaaattaataggagagaaaaacacataaacacctgaaaaaccctcctgcctaggcaaaatagcaccctcccgctccagaacaacatacagcgcttccacagcggcagccataacagtcagccttaccagtaaaaaagaaaacctattaaaaaaacaccactcgacacggcaccagctcaatcagtcacagtgtaaaaaagggccaagtgcagagcgagtatatataggactaaaaaatgacgtaacggttaaagtccacaaaaaacacccagaaaaccgcacgcgaacctacgcccagaaacgaaagccaaaaaacccacaacttcctcaaatcgtcacttccgttttcccacgttacgtcacttcccattttaagaaaactacaattcccaacacatacaagttactccgcccttaattaaatcggatccgatatctagatgtattcgcgaggtaccgagctcgaattctctggccgtcgttttacaacgtcgtgactgggaaaaccctggcgttacccaacttaatcgccttgcagcacatccccctttcgccagctggcgtaatagcgaagaggcccgcaccgatcgcccttcccaacagttgcgcagcctgaatggcgaatggcgcctgatgcggtattttctccttacgcatctgtgcggtatttcacaccgcatatggtgcactctcagtacaatctgctctgatgccgcatagttaagccagccccgacacccgccaacacccgctgacgcgccctgacgggcttgtctgctcccggcatccgcttacagacaagctgtgaccgtctccgggagctgcatgtgtcagaggttttcaccgtcatcaccgaaacgcgcga

SEQ ID NO: 84 - DNA, 11366 bp, synthetic construct
  source 1..11366: mol_type = other DNA
tgcagctctggcccgtgtctcaaaatctctgatgttacattgcacaagataaaaatatatcatcatgaacaataaaactgtctgcttacataaacagtaatacaaggggtgttatgagccatattcaacgggaaacgtcgaggccgcgattaaattccaacatggatgctgatttatatgggtataaatgggctcgcgataatgtcgggcaatcaggtgcgacaatctatcgcttgtatgggaagcccgatgcgccagagttgtttctgaaacatggcaaaggtagcgttgccaatgatgttacagatgagatggtcagactaaactggctgacggaatttatgcctcttccgaccatcaagcattttatccgtactcctgatgatgcatggttactcaccactgcgatccccggaaaaacagcattccaggtattagaagaatatcctgattcaggtgaaaatattgttgatgcgctggcagtgttcctgcgccggttgcattcgattcctgtttgtaattgtccttttaacagcgatcgcgtatttcgtctcgctcaggcgcaatcacgaatgaataacggtttggttgatgcgagtgattttgatgacgagcgtaatggctggcctgttgaacaagtctggaaagaaatgcataaacttttgccattctcaccggattcagtcgtcactcatggtgatttctcacttgataaccttatttttgacgaggggaaattaataggttgtattgatgttggacgagtcggaatcgcagaccgataccaggatcttgccatcctatggaactgcctcggtgagttttctccttcattacagaaacggctttttcaaaaatatggtattgataatcctgatatgaataaattgcagtttcatttgatgctcgatgagtttttctaatcagaattggttaattggttgtaacattattcagattgggcttgatttaaaacttcatttttaatttaaaaggatctaggtgaagatcctttttgataatctcatgaccaaaatcccttaacgtgagttttcgttccactgagcgtcagaccccgtagaaaagatcaaaggatcttcttgagatcctttttttctgcgcgtaatctgctgcttgcaaacaaaaaaaccaccgctaccagcggtggtttgtttgccggatcaagagctaccaactctttttccgaaggtaactggcttcagcagagcgcagataccaaatactgttcttctagtgtagccgtagttaggccaccacttcaagaactctgtagcaccgcctacatacctcgctctgctaatcctgttaccagtggctgctgccagtggcgataagtcgtgtcttaccgggttggactcaagacgatagttaccggataaggcgcagcggtcgggctgaacggggggttcgtgcacacagcccagcttggagcgaacgacctacaccgaactgagatacctacagcgtgagctatgagaaagcgccacgcttcccgaagggagaaaggcggacaggtatccggtaagcggcagggtcggaacaggagagcgcacgagggagcttccagggggaaacgcctggtatctttatagtcctgtcgggtttcgccacctctgacttgagcgtcgatttttgtgatgctcgtcaggggggcggagcctatggaaaaacgccagcaacgcggcctttttacggttcctggccttttgctggccttttgctcacatgttctttcctgcgttatcccctgattctgtggataaccgtattaccgcctttgagtgagctgataccgctcgccgcagccgaacgaccgagcgcagcgagtcagtgagcgaggaagcggaagagcgcccaatacgcaaaccgcctctccccgcgcgttggccgattcattaatgcagctggcacgacaggtttcccgactggaaagcgggcagtgagcgcaacgcaattaatgtgagttagctcactcattaggcaccccaggctttacactttatgcttccggctcgtatgttgtgtggaattgtgagcggataacaatttcacacaggaaacagctatgaccatgattacaccaagcttgcatgcaggcctatccgtagatgtacctggacatccaggtgatgccggcggcggtggtggaggcgcgcggaaagtcgcggacgcggttccagatgttgcgcagcggcaaaaagtgctccatggtcgggacgctctggccggtgaggcgtgcgcagtcgttgacgctctagaccgtgcaaaaggagagcctgtaagcgggcactcttccgtggtctggtggataaattcgcaagggtatcatggcggacgaccggggttcgaaccccggatccggccgtccgccgtgatccatgcggttaccgcccgcgtgtcgaacccaggtgtgcgacgtcagacaacgggggagcgctccttttggcttccttccaggcgcggcggctgctgcgctagcttttttggccactggccgcgcgcggcgtaagcggttaggctggaaagcgaaagcattaagtggctcgctccctgtagccggagggttattttccaagggttgagtcgcaggacccccggttcgagtctcgggccggccggactgcggcgaacgggggtttgcctccccgtcatgcaagaccccgcttgcaaattcctccggaaacagggacgagccccttttttgcttttcccagatgcatccggtgctgcggcagatgcgcccccctcctcagcagcggcaagagcaagagcagcggcagacatgcagggcaccctccccttctcctaccgcgtcaggaggggcaacatcgatccagacatgataagatacattgatgagtttggacaaaccacaactagaatgcagtgaaaaaaatgctttatttgtgaaatttgtgatgctattgctttatttgtaaccattataagctgcaataaacaagtttgtacactctcgggtgattatttacccccacccttgccgtctgcgccgtttaaaaatcaaaggggttctgccgcgcatcgctatgcgccactggcagggacacgttgcgatactggtgtttagtgctccacttaaactcaggcacaaccatccgcggcagctcggtgaagttttcactccacaggctgcgcaccatcaccaacgcgtttagcaggtcgggcgccgatatcttgaagtcgcagttggggcctccgccctgcgcgcgcgagttgcgatacacagggttgcagcactggaacactatcagcgccgggtggtgcacgctggccagcacgctcttgtcggagatcagatccgcgtccaggtcctccgcgttgctcagggcgaacggagtcaactttggtagctgccttcccaaaaagggcgcgtgcccaggctttgagttgcactcgcaccgtagtggcatcaaaaggtgaccgtgcccggtctgggcgttaggatacagcgcctgcataaaagccttgatctgcttaaaagccacctgagcctttgcgccttcagagaagaacatgccgcaagacttgccggaaaactgattggccggacaggccgcgtcgtgcacgcagcaccttgcgtcggtgttggagatctgcaccacatttcggccccaccggttcttcacgatcttggccttgctagactgctccttcagcgcgcgctgcccgttttcgctcgtcacatccatttcaatcacgtgctccttatttatcataatgcttccgtgtagacacttaagctcgccttcgatctcagcgcagcggtgcagccacaacgcgcagcccgtgggctcgtgatgcttgtaggtcacctctgcaaacgactgcaggtacgcctgcaggaatcgccccatcatcgtcacaaaggtcttgttgctggtgaaggtcagctgcaacccgcggtgctcctcgttcagccaggtcttgcatacggccgccagagcttccacttggtcaggcagtagtttgaagttcgcctttagatcgttatccacgtggtacttgtccatcagcgcgcgcgcagcctccatgcccttctcccacgcagacacgatcggcacactcagcgggttcatcaccgtaatttcactttccgcttcgctgggctcttcctcttcctcttgagtccgcataccacgcgccactgggtcgtcttcattcagccgccgcactgtgcgcttacctcctttgccatgcttgattagcaccggtgggttgctgaaacccaccatttgtagcgccacatcttctctttcttcctcgctgtccacgattacctctggtgatggcgggcgctcgggcttgggagaagggcgcttctttttcttcttgggcgcaatggccaaatccgccgccgaggtcgatggccgcgggctgggtgtgcgcggcaccagcgcgtcttgtgatgagtcttcctcgtcctcggactcgatacgccgcctcatccgcttttttgggggcgcccggggaggcggcggcgacggggacggggacgacacgtcctccatggttgggggacgtcgcgccgcaccgcgtccgcgctcgggggtggtttcgcgctgctcctcttcccgactggccatttccttctcctataggcagaaaaagatcatggagtcagtcgagaagaaggacagcctaaccgccccctctgagttcgccaccaccgcctccaccgatgccgccaacgcgcctaccaccttccccgtcgaggcacccccgcttgaggaggaggaagtgattatcgagcaggacccaggttttgtaagcgaagacgacgaggaccgctcagtaccaacagaggataaaaagcaagaccaggacaacgcagaggcaaacgaggaacaagtcgggcggggggacgaaaggcatggcgactacctagatgtgggagacgacgtgctgttgaagcatctgcagcgccagtgcgccattatctgcgacgcgttgcaagagcgcagcgatgtgcccctcgccatagcggatgtcagccttgcctacgaacgccacctattctcaccgcgcgtaccccccaaacgccaagaaaacggcacatgcgagcccaacccgcgcctcaacttctaccccgtatttgccgtgccagaggtgcttgccacctatcacatctttttccaaaactgcaagatacccctatcctgccgtgccaaccgcagccgagcggacaagcagctggccttgcggcagggcgctgtcatacctgatatcgcctcgctcaacgaagtgccaaaaatctttgagggtcttggacgcgacgagaagcgcgcggcaaacgctctgcaacaggaaaacagcgaaaatgaaagtcactctggagtgttggtggaactcgagggtgacaacgcgcgcctagccgtactaaaacgcagcatcgaggtcacccactttgcctacccggcacttaacctaccccccaaggtcatgagcacagtcatgagtgagctgatcgtgcgccgtgcgcagcccctggagagggatgcaaatttgcaagaacaaacagaggagggcctacccgcagttggcgacgagcagctagcgcgctggcttcaaacgcgcgagcctgccgacttggaggagcgacgcaaactaatgatggccgcagtgctcgttaccgtggagcttgagtgcatgcagcggttctttgctgacccggagatgcagcgcaagctagaggaaacattgcactacacctttcgacagggctacgtacgccaggcctgcaagatctccaacgtggagctctgcaacctggtctcctaccttggaattttgcacgaaaaccgccttgggcaaaacgtgcttcattccacgctcaagggcgaggcgcgccgcgactacgtccgcgactgcgtttacttatttctatgctacacctggcagacggccatgggcgtttggcagcagtgcttggaggagtgcaacctcaaggagctgcagaaactgctaaagcaaaacttgaaggacctatggacggccttcaacgagcgctccgtggccgcgcacctggcggacatcattttccccgaacgcctgcttaaaaccctgcaacagggtctgccagacttcaccagtcaaagcatgttgcagaactttaggaactttatcctagagcgctcaggaatcttgcccgccacctgctgtgcacttcctagcgactttgtgcccattaagtaccgcgaatgccctccgccgctttggggccactgctaccttctgcagctagccaactaccttgcctaccactctgacataatggaagacgtgagcggtgacggtctactggagtgtcactgtcgctgcaacctatgcaccccgcaccgctccctggtttgcaattcgcagctgcttaacgaaagtcaaattatcggtacctttgagctgcagggtccctcgcctgacgaaaagtccgcggctccggggttgaaactcactccggggctgtggacgtcggcttaccttcgcaaatttgtacctgaggactaccacgcccacgagattaggttctacgaagaccaatcccgcccgcctaatgcggagcttaccgcctgcgtcattacccagggccacattcttggccaattgcaagccatcaacaaagcccgccaagagtttctgctacgaaagggacggggggtttacttggacccccagtccggcgaggagctcaacccaatccccccgccgccgcagccctatcagcagcagccgcgggcccttgcttcccaggatggcacccaaaaagaagctgcagctgccgccgccacccacggacgaggaggaatactgggacagtcaggcagaggaggttttggacgaggaggaggaggacatgatggaagactgggagagcctagacgaggaagcttccgaggtcgaagaggtgtcagacgaaacaccgtcaccctcggtcgcattcccctcgccggcgccccagaaatcggcaaccggttccagcatggctacaacctccgctcctcaggcgccgccggcactgcccgttcgccgacccaaccgtagatgggacaccactggaaccagggccggtaagtccaagcagccgccgccgttagcccaagagcaacaacagcgccaaggctaccgctcatggcgcgggcacaagaacgccatagttgcttgcttgcaagactgtgggggcaacatctccttcgcccgccgctttcttctctaccatcacggcgtggccttcccccgtaacatcctgcattactaccgtcatctctacagcccatactgcaccggcggcagcggcagcaacagcagcggccacacagaagcaaaggcgaccggatagcaagactctgacaaagcccaagaaatccacagcggcggcagcagcaggaggaggagcgctgcgtctggcgcccaacgaacccgtatcgacccgcgagcttagaaacaggatttttcccactctgtatgctatatttcaacagagcaggggccaagaacaagagctgaaaataaaaaacaggtctctgcgatccctcacccgcagctgcctgtatcacaaaagcgaagatcagcttcggcgcacgctggaagacgcggaggctctcttcagtaaatactgcgcgctgactcttaaggactagtttcgcgccctttctcaaatttaagcgcgaaaactacgtcatctccagcggccacacccggcgccagcacctgttgtcagcgccattatgagcaaggaaattcccacgccctacatgtggagttaccagccacaaatgggacttgcggctggagctgcccaagactactcaacccgaataaactacatgagcgcggggcggccgccgtttgtgttatgtttcaacgtgtttatttttcaattgcagaaaatttcaagtcatttttcattcagtagtatagccccaccaccacatagcttatacagatcaccgtaccttaatcaaactcacagaaccctagtattcaacctgccacctccctcccaacacacagagtacacagtcctttctccccggctggccttaaaaagcatcatatcatgggtaacagacatattcttaggtgttatattccacacggtttcctgtcgagccaaacgctcatcagtgatattaataaactccccgggcagctcacttaagttcatgtcgctgtccagctgctgagccacaggctgctgtccaacttgcggttgcttaacgggcggcgaaggagaagtccacgcctacatgggggtagagtcataatcgtgcatcaggatagggcggtggtgctgcagcagcgcgcgaataaactgctgccgccgccgctccgtcctgcaggaatacaacatggcagtggtctcctcagcgatgattcgcaccgcccgcagcataaggcgccttgtcctccgggcacagcagcgcaccctgatctcacttaaatcagcacagtaactgcagcacagcaccacaatattgttcaaaatcccacagtgcaaggcgctgtatccaaagctcatggcggggaccacagaacccacgtggccatcataccacaagcgcaggtagattaagtggcgacccctcataaacacgctggacataaacattacctcttttggcatgttgtaattcaccacctcccggtaccatataaacctctgattaaacatggcgccatccaccaccatcctaaaccagctggccaaaacctgcccgccggctatacactgcagggaaccgggactggaacaatgacagtggagagcccaggactcgtaaccatggatcatcatgctcgtcatgatatcaatgttggcacaacacaggcacacgtgcatacacttcctcaggattacaagctcctcccgcgttagaaccatatcccagggaacaacccattcctgaatcagcgtaaatcccacactgcagggaagacctcgcacgtaactcacgttgtgcattgtcaaagtgttacattcgggcagcagcggatgatcctccagtatggtagcgcgggtttctgtctcaaaaggaggtagacgatccctactgtacggagtgcgccgagacaaccgagatcgtgttggtcgtagtgtcatgccaaatggaacgccggacgtagtcatatttcctgaagcaaaaccaggtgcgggcgtgacaaacagatctgcgtctccggtctcgccgcttagatcgctctgtgtagtagttgtagtatatccactctctcaaagcatccaggcgccccctggcttcgggttctatgtaaactccttcatgcgccgctgccctgataacatccaccaccgcagaataagccacacccagccaacctacacattcgttctgcgagtcacacacgggaggagcgggaagagctggaagaaccatgtttttttttttattccaaaagattatccaaaacctcaaaatgaagatctattaagtgaacgcgctcccctccggtggcgtggtcaaactctacagccaaagaacagataatggcatttgtaagatgttgcacaatggcttccaaaaggcaaacggccctcacgtccaagtggacgtaaaggctaaacccttcagggtgaatctcctctataaacattccagcaccttcaaccatgcccaaataattctcatctcgccaccttctcaatatatctctaagcaaatcccgaatattaagtccggccattgtaaaaatctgctccagagcgccctccaccttcagcctcaagcagcgaatcatgattgcaaaaattcaggttcctcacagacctgtataagattcaaaagcggaacattaacaaaaataccgcgatcccgtaggtcccttcgcagggccagctgaacataatcgtgcaggtctgcacggaccagcgcggccacttccccgccaggaaccatgacaaaagaacccacactgattatgacacgcatactcggagctatgctaaccagcgtagccccgatgtaagcttgttgcatgggcggcgatataaaatgcaaggtgctgctcaaaaaatcaggcaaagcctcgcgcaaaaaagaaagcacatcgtagtcatgctcatgcagataaaggcaggtaagctccggaaccaccacagaaaaagacaccatttttctctcaaacatgtctgcgggtttctgcataaacacaaaataaaataacaaaaaaacatttaaacattagaagcctgtcttacaacaggaaaaacaacccttataagcataagacggactacggccatgccggcgtgaccgtaaaaaaactggtcaccgtgattaaaaagcaccaccgacagctcctcggtcatgtccggagtcataatgtaagactcggtaaacacatcaggttgattcacatcggtcagtgctaaaaagcgaccgaaatagcccgggggaatacatacccgcaggcgtagagacaacattacagcccccataggaggtataacaaaattaataggagagaaaaacacataaacacctgaaaaaccctcctgcctaggcaaaatagcaccctcccgctccagaacaacatacagcgcttccacagcggcagccataacagtcagccttaccagtaaaaaagaaaacctattaaaaaaacaccactcgacacggcaccagctcaatcagtcacagtgtaaaaaagggccaagtgcagagcgagtatatataggactaaaaaatgacgtaacggttaaagtccacaaaaaacacccagaaaaccgcacgcgaacctacgcccagaaacgaaagccaaaaaacccacaacttcctcaaatcgtcacttccgttttcccacgttacgtcacttcccattttaagaaaactacaattcccaacacatacaagttactccgcccttaattaaatcggatccgatatctagatgtattcgcgaggtaccgagctcgaattctctggccgtcgttttacaacgtcgtgactgggaaaaccctggcgttacccaacttaatcgccttgcagcacatccccctttcgccagctggcgtaatagcgaagaggcccgcaccgatcgcccttcccaacagttgcgcagcctgaatggcgaatggcgcctgatgcggtattttctccttacgcatctgtgcggtatttcacaccgcatatggtgcactctcagtacaatctgctctgatgccgcatagttaagccagccccgacacccgccaacacccgctgacgcgccctgacgggcttgtctgctcccggcatccgcttacagacaagctgtgaccgtctccgggagctgcatgtgtcagaggttttcaccgtcatcaccgaaacgcgcga

SEQ ID NO: 85 - DNA, 10311 bp, synthetic construct
  source 1..10311: mol_type = other DNA
tgcagctctggcccgtgtctcaaaatctctgatgttacattgcacaagataaaaatatatcatcatgaacaataaaactgtctgcttacataaacagtaatacaaggggtgttatgagccatattcaacgggaaacgtcgaggccgcgattaaattccaacatggatgctgatttatatgggtataaatgggctcgcgataatgtcgggcaatcaggtgcgacaatctatcgcttgtatgggaagcccgatgcgccagagttgtttctgaaacatggcaaaggtagcgttgccaatgatgttacagatgagatggtcagactaaactggctgacggaatttatgcctcttccgaccatcaagcattttatccgtactcctgatgatgcatggttactcaccactgcgatccccggaaaaacagcattccaggtattagaagaatatcctgattcaggtgaaaatattgttgatgcgctggcagtgttcctgcgccggttgcattcgattcctgtttgtaattgtccttttaacagcgatcgcgtatttcgtctcgctcaggcgcaatcacgaatgaataacggtttggttgatgcgagtgattttgatgacgagcgtaatggctggcctgttgaacaagtctggaaagaaatgcataaacttttgccattctcaccggattcagtcgtcactcatggtgatttctcacttgataaccttatttttgacgaggggaaattaataggttgtattgatgttggacgagtcggaatcgcagaccgataccaggatcttgccatcctatggaactgcctcggtgagttttctccttcattacagaaacggctttttcaaaaatatggtattgataatcctgatatgaataaattgcagtttcatttgatgctcgatgagtttttctaatcagaattggttaattggttgtaacattattcagattgggcttgatttaaaacttcatttttaatttaaaaggatctaggtgaagatcctttttgataatctcatgaccaaaatcccttaacgtgagttttcgttccactgagcgtcagaccccgtagaaaagatcaaaggatcttcttgagatcctttttttctgcgcgtaatctgctgcttgcaaacaaaaaaaccaccgctaccagcggtggtttgtttgccggatcaagagctaccaactctttttccgaaggtaactggcttcagcagagcgcagataccaaatactgttcttctagtgtagccgtagttaggccaccacttcaagaactctgtagcaccgcctacatacctcgctctgctaatcctgttaccagtggctgctgccagtggcgataagtcgtgtcttaccgggttggactcaagacgatagttaccggataaggcgcagcggtcgggctgaacggggggttcgtgcacacagcccagcttggagcgaacgacctacaccgaactgagatacctacagcgtgagctatgagaaagcgccacgcttcccgaagggagaaaggcggacaggtatccggtaagcggcagggtcggaacaggagagcgcacgagggagcttccagggggaaacgcctggtatctttatagtcctgtcgggtttcgccacctctgacttgagcgtcgatttttgtgatgctcgtcaggggggcggagcctatggaaaaacgccagcaacgcggcctttttacggttcctggccttttgctggccttttgctcacatgttctttcctgcgttatcccctgattctgtggataaccgtattaccgcctttgagtgagctgataccgctcgccgcagccgaacgaccgagcgcagcgagtcagtgagcgaggaagcggaagagcgcccaatacgcaaaccgcctctccccgcgcgttggccgattcattaatgcagctggcacgacaggtttcccgactggaaagcgggcagtgagcgcaacgcaattaatgtgagttagctcactcattaggcaccccaggctttacactttatgcttccggctcgtatgttgtgtggaattgtgagcggataacaatttcacacaggaaacagctatgaccatgattacaccaagcttgcatgcaggcctctgcagtcgaccagaagcaccatgtccttgggtccggcctgctgaatgcgcaggcggtcggccatgccccaggcttcgttttgacatcggcgcaggtctttgtagtagtcttgcatgagcctttctaccggcacttcttcttctccttcctcttgtcctgcatctcttgcatctatcgctgcggcggcggcggagtttggccgtaggtggcgccctcttcctcccatgcgtgtgaccccgaagcccctcatcggctgaagcagggctaggtcggcgacaacgcgctcggctaatatggcctgctgcacctgcgtgagggtagactggaagtcatccatgtccacaaagcggtggtatgcgcccgtgttgatggtgtaagtgcagttggccataacggaccagttaacggtctggtgacccggctgcgagagctcggtgtacctgagacgcgagtaagccctcgagtcaaatacgtagtcgttgcaagtccgcaccaggtactggtatcccaccaaaaagtgcggcggcggctggcggtagaggggccagcgtagggtggccggggctccgggggcgagatcttccaacataaggcgatgatatccgtagatgtacctggacatccaggtgatgccggcggcggtggtggaggcgcgcggaaagtcgcggacgcggttccagatgttgcgcagcggcaaaaagtgctccatggtcgggacgctctggccggtcaggcgcgcgcaatcgttgacgctctagcgtgcaaaaggagagcctgtaagcgggcactcttccgtggtctggtggataaattcgcaagggtatcatggcggacgaccggggttcgagccccgtatccggccgtccgccgtgatccatgcggttaccgcccgcgtgtcgaacccaggtgtgcgacgtcagacaacgggggagtgctccttttggcttccttccaggcgcggcggctgctgcgctagcttttttggccactggccgcgcgcagcgtaagcggttaggctggaaagcgaaagcattaagtggctcgctccctgtagccggagggttattttccaagggttgagtcgcgggacccccggttcgagtctcggaccgagactgggggcgtacactggatggcctttgcctggaacccgcactcaaaaacatgctacctctttgagccctttggcttttctgaccagcgactcaagcaggtttaccagtttgagtacgagtcactcctgcgccgtagcgccattgcttcttcccccgaccgctgtataacgctggaaaagtccacccaaagcgtacaggggcccaactcggccgcctgtggactattctgctgcatgtttctccacgcctttgccaactggccccaaactcccatggatcacaaccccaccatgaaccttattaccggggtacccaactccatgctcaacagtccccaggtacagcccaccctgcgtcgcaaccaggaacagctctacagcttcctggagcgccactcgccctacttccgcagccacagtgcgcagattaggagcgccacttctttttgtcacttgaaaaacatgtaaaaataatgtactagagacactttcaataaaggcaaatgcttttatttgtacactctcgggtgattatttacccccacccttgccgtctgcgccgtttaaaaatcaaaggggttctgccgcgcatcgctatgcgccactggcagggacacgttgcgatactggtgtttagtgctccacttaaactcaggcacaaccatccgcggcagctcggtgaagttttcactccacaggctgcgcaccatcaccaacgcgtttagcaggtcgggcgccgatatcttgaagtcgcagttggggcctccgccctgcgcgcgcgagttgcgatacacagggttgcagcactggaacactatcagcgccgggtggtgcacgctggccagcacgctcttgtcggagatcagatccgcgtccaggtcctccgcgttgctcagggcgaacggagtcaactttggtagctgccttcccaaaaagggcgcgtgcccaggctttgagttgcactcgcaccgtagtggcatcaaaaggtgaccgtgcccggtctgggcgttaggatacagcgcctgcataaaagccttgatctgcttaaaagccacctgagcctttgcgccttcagagaagaacatgccgcaagacttgccggaaaactgattggccggacaggccgcgtcgtgcacgcagcaccttgcgtcggtgttggagatctgcaccacatttcggccccaccggttcttcacgatcttggccttgctagactgctccttcagcgcgcgctgcccgttttcgctcgtcacatccatttcaatcacgtgctccttatttatcataatgcttccgtgtagacacttaagctcgccttcgatctcagcgcagcggtgcagccacaacgcgcagcccgtgggctcgtgatgcttgtaggtcacctctgcaaacgactgcaggtacgcctgcaggaatcgccccatcatcgtcacaaaggtcttgttgctggtgaaggtcagctgcaacccgcggtgctcctcgttcagccaggtcttgcatacggccgccagagcttccacttggtcaggcagtagtttgaagttcgcctttagatcgttatccacgtggtacttgtccatcagcgcgcgcgcagcctccatgcccttctcccacgcagacacgatcggcacactcagcgggttcatcaccgtaatttcactttccgcttcgctgggctcttcctcttcctcttgcgtccgcataccacgcgccactgggtcgtcttcattcagccgccgcactgtgcgcttacctcctttgccatgcttgattagcaccggtgggttgctgaaacccaccatttgtagcgccacatcttctctttcttcctcgctgtccacgattacctctggtgatggcgggcgctcgggcttgggagaagggcgcttctttttcttcttgggcgcaatggccaaatccgccgccgaggtcgatggccgcgggctgggtgtgcgcggcaccagcgcgtcttgtgatgagtcttcctcgtcctcggactcgatacgccgcctcatccgcttttttgggggcgcccggggaggcggcggcgacggggacggggacgacacgtcctccatggttgggggacgtcgcgccgcaccgcgtccgcgctcgggggtggtttcgcgctgctcctcttcccgactggccatttccttctcctataggcagaaaaagatccacaaaagcgaagatcagcttcggcgcacgctggaagacgcggaggctctcttcagtaaatactgcgcgctgactcttaaggactagtttcgcgccctttctcaaatttaagcgcgaaaactacgtcatctccagcggccacacccggcgccagcacctgttgtcagcgccattggcgcgccggccggccgaatatcttcatttaaatgtttaaacatcgatgcggccgcgattaggttctacgaagaccaatcccgcccgcctaatgcggagcttaccgcctgcgtcattacccagggccacattcttggccaattgcaagccatcaacaaagcccgccaagagtttctgctacgaaagggacggggggtttacttggacccccagtccggcgaggagctcaacccaatccccccgccgccgcagccctatcagcagcagccgcgggcccttgcttcccaggatggcacccaaaaagaagctgcagctgccgccgccacccacggacgaggaggaatactgggacagtcaggcagaggaggttttggacgaggaggaggaggacatgatggaagactgggagagcctagacgaggaagcttccgaggtcgaagaggtgtcagacgaaacaccgtcaccctcggtcgcattcccctcgccggcgccccagaaatcggcaaccggttccagcatggctacaacctccgctcctcaggcgccgccggcactgcccgttcgccgacccaaccgtagatgggacaccactggaaccagggccggtaagtccaagcagccgccgccgttagcccaagagcaacaacagcgccaaggctaccgctcatggcgcgggcacaagaacgccatagttgcttgcttgcaagactgtgggggcaacatctccttcgcccgccgctttcttctctaccatcacggcgtggccttcccccgtaacatcctgcattactaccgtcatctctacagcccatactgcaccggcggcagcggcagcaacagcagcggccacacagaagcaaaggcgaccggatagcaagactctgacaaagcccaagaaatccacagcggcggcagcagcaggaggaggagcgctgcgtctggcgcccaacgaacccgtatcgacccgcgagcttagaaacaggatttttcccactctgtatgctatatttcaacagagcaggggccaagaacaagagctgaaaataaaaaacaggtctctgcgatccctcacccgcagctgcctgtatcacaaaagcgaagatcagcttcggcgcacgctggaagacgcggaggctctcttcagtaaatactgcgcgctgactcttaaggactagaataaaagatctttattttcattagatctgtgtgttggttttttgtgtggcggccgccgtttgtgttatgtttcaacgtgtttatttttcaattgcagaaaatttcaagtcatttttcattcagtagtatagccccaccaccacatagcttatacagatcaccgtaccttaatcaaactcacagaaccctagtattcaacctgccacctccctcccaacacacagagtacacagtcctttctccccggctggccttaaaaagcatcatatcatgggtaacagacatattcttaggtgttatattccacacggtttcctgtcgagccaaacgctcatcagtgatattaataaactccccgggcagctcacttaagttcatgtcgctgtccagctgctgagccacaggctgctgtccaacttgcggttgcttaacgggcggcgaaggagaagtccacgcctacatgggggtagagtcataatcgtgcatcaggatagggcggtggtgctgcagcagcgcgcgaataaactgctgccgccgccgctccgtcctgcaggaatacaacatggcagtggtctcctcagcgatgattcgcaccgcccgcagcataaggcgccttgtcctccgggcacagcagcgcaccctgatctcacttaaatcagcacagtaactgcagcacagcaccacaatattgttcaaaatcccacagtgcaaggcgctgtatccaaagctcatggcggggaccacagaacccacgtggccatcataccacaagcgcaggtagattaagtggcgacccctcataaacacgctggacataaacattacctcttttggcatgttgtaattcaccacctcccggtaccatataaacctctgattaaacatggcgccatccaccaccatcctaaaccagctggccaaaacctgcccgccggctatacactgcagggaaccgggactggaacaatgacagtggagagcccaggactcgtaaccatggatcatcatgctcgtcatgatatcaatgttggcacaacacaggcacacgtgcatacacttcctcaggattacaagctcctcccgcgttagaaccatatcccagggaacaacccattcctgaatcagcgtaaatcccacactgcagggaagacctcgcacgtaactcacgttgtgcattgtcaaagtgttacattcgggcagcagcggatgatcctccagtatggtagcgcgggtttctgtctcaaaaggaggtagacgatccctactgtacggagtgcgccgagacaaccgagatcgtgttggtcgtagtgtcatgccaaatggaacgccggacgtagtcatatttcctgaagcaaaaccaggtgcgggcgtgacaaacagatctgcgtctccggtctcgccgcttagatcgctctgtgtagtagttgtagtatatccactctctcaaagcatccaggcgccccctggcttcgggttctatgtaaactccttcatgcgccgctgccctgataacatccaccaccgcagaataagccacacccagccaacctacacattcgttctgcgagtcacacacgggaggagcgggaagagctggaagaaccatgtttttttttttattccaaaagattatccaaaacctcaaaatgaagatctattaagtgaacgcgctcccctccggtggcgtggtcaaactctacagccaaagaacagataatggcatttgtaagatgttgcacaatggcttccaaaaggcaaacggccctcacgtccaagtggacgtaaaggctaaacccttcagggtgaatctcctctataaacattccagcaccttcaaccatgcccaaataattctcatctcgccaccttctcaatatatctctaagcaaatcccgaatattaagtccggccattgtaaaaatctgctccagagcgccctccaccttcagcctcaagcagcgaatcatgattgcaaaaattcaggttcctcacagacctgtataagattcaaaagcggaacattaacaaaaataccgcgatcccgtaggtcccttcgcagggccagctgaacataatcgtgcaggtctgcacggaccagcgcggccacttccccgccaggaaccatgacaaaagaacccacactgattatgacacgcatactcggagctatgctaaccagcgtagccccgatgtaagcttgttgcatgggcggcgatataaaatgcaaggtgctgctcaaaaaatcaggcaaagcctcgcgcaaaaaagaaagcacatcgtagtcatgctcatgcagataaaggcaggtaagctccggaaccaccacagaaaaagacaccatttttctctcaaacatgtctgcgggtttctgcataaacacaaaataaaataacaaaaaaacatttaaacattagaagcctgtcttacaacaggaaaaacaacccttataagcataagacggactacggccatgccggcgtgaccgtaaaaaaactggtcaccgtgattaaaaagcaccaccgacagctcctcggtcatgtccggagtcataatgtaagactcggtaaacacatcaggttgattcacatcggtcagtgctaaaaagcgaccgaaatagcccgggggaatacatacccgcaggcgtagagacaacattacagcccccataggaggtataacaaaattaataggagagaaaaacacataaacacctgaaaaaccctcctgcctaggcaaaatagcaccctcccgctccagaacaacatacagcgcttccacagcggcagccataacagtcagccttaccagtaaaaaagaaaacctattaaaaaaacaccactcgacacggcaccagctcaatcagtcacagtgtaaaaaagggccaagtgcagagcgagtatatataggactaaaaaatgacgtaacggttaaagtccacaaaaaacacccagaaaaccgcacgcgaacctacgcccagaaacgaaagccaaaaaacccacaacttcctcaaatcgtcacttccgttttcccacgttacgtcacttcccattttaagaaaactacaattcccaacacatacaagttactccgcccttaattaaatcggatccgatatctagatgtattcgcgaggtaccgagctcgaattctctggccgtcgttttacaacgtcgtgactgggaaaaccctggcgttacccaacttaatcgccttgcagcacatccccctttcgccagctggcgtaatagcgaagaggcccgcaccgatcgcccttcccaacagttgcgcagcctgaatggcgaatggcgcctgatgcggtattttctccttacgcatctgtgcggtatttcacaccgcatatggtgcactctcagtacaatctgctctgatgccgcatagttaagccagccccgacacccgccaacacccgctgacgcgccctgacgggcttgtctgctcccggcatccgcttacagacaagctgtgaccgtctccgggagctgcatgtgtcagaggttttcaccgtcatcaccgaaacgcgcga

SEQ ID NO: 86 - DNA, 10589 bp, synthetic construct
  source 1..10589: mol_type = other DNA
tgcagctctggcccgtgtctcaaaatctctgatgttacattgcacaagataaaaatatatcatcatgaacaataaaactgtctgcttacataaacagtaatacaaggggtgttatgagccatattcaacgggaaacgtcgaggccgcgattaaattccaacatggatgctgatttatatgggtataaatgggctcgcgataatgtcgggcaatcaggtgcgacaatctatcgcttgtatgggaagcccgatgcgccagagttgtttctgaaacatggcaaaggtagcgttgccaatgatgttacagatgagatggtcagactaaactggctgacggaatttatgcctcttccgaccatcaagcattttatccgtactcctgatgatgcatggttactcaccactgcgatccccggaaaaacagcattccaggtattagaagaatatcctgattcaggtgaaaatattgttgatgcgctggcagtgttcctgcgccggttgcattcgattcctgtttgtaattgtccttttaacagcgatcgcgtatttcgtctcgctcaggcgcaatcacgaatgaataacggtttggttgatgcgagtgattttgatgacgagcgtaatggctggcctgttgaacaagtctggaaagaaatgcataaacttttgccattctcaccggattcagtcgtcactcatggtgatttctcacttgataaccttatttttgacgaggggaaattaataggttgtattgatgttggacgagtcggaatcgcagaccgataccaggatcttgccatcctatggaactgcctcggtgagttttctccttcattacagaaacggctttttcaaaaatatggtattgataatcctgatatgaataaattgcagtttcatttgatgctcgatgagtttttctaatcagaattggttaattggttgtaacattattcagattgggcttgatttaaaacttcatttttaatttaaaaggatctaggtgaagatcctttttgataatctcatgaccaaaatcccttaacgtgagttttcgttccactgagcgtcagaccccgtagaaaagatcaaaggatcttcttgagatcctttttttctgcgcgtaatctgctgcttgcaaacaaaaaaaccaccgctaccagcggtggtttgtttgccggatcaagagctaccaactctttttccgaaggtaactggcttcagcagagcgcagataccaaatactgttcttctagtgtagccgtagttaggccaccacttcaagaactctgtagcaccgcctacatacctcgctctgctaatcctgttaccagtggctgctgccagtggcgataagtcgtgtcttaccgggttggactcaagacgatagttaccggataaggcgcagcggtcgggctgaacggggggttcgtgcacacagcccagcttggagcgaacgacctacaccgaactgagatacctacagcgtgagctatgagaaagcgccacgcttcccgaagggagaaaggcggacaggtatccggtaagcggcagggtcggaacaggagagcgcacgagggagcttccagggggaaacgcctggtatctttatagtcctgtcgggtttcgccacctctgacttgagcgtcgatttttgtgatgctcgtcaggggggcggagcctatggaaaaacgccagcaacgcggcctttttacggttcctggccttttgctggccttttgctcacatgttctttcctgcgttatcccctgattctgtggataaccgtattaccgcctttgagtgagctgataccgctcgccgcagccgaacgaccgagcgcagcgagtcagtgagcgaggaagcggaagagcgcccaatacgcaaaccgcctctccccgcgcgttggccgattcattaatgcagctggcacgacaggtttcccgactggaaagcgggcagtgagcgcaacgcaattaatgtgagttagctcactcattaggcaccccaggctttacactttatgcttccggctcgtatgttgtgtggaattgtgagcggataacaatttcacacaggaaacagctatgaccatgattacaccaagcttgcatgcaggcctctgcagtcgaccagaagcaccatgtccttgggtccggcctgctgaatgcgcaggcggtcggccatgccccaggcttcgttttgacatcggcgcaggtctttgtagtagtcttgcatgagcctttctaccggcacttcttcttctccttcctcttgtcctgcatctcttgcatctatcgctgcggcggcggcggagtttggccgtaggtggcgccctcttcctcccatgcgtgtgaccccgaagcccctcatcggctgaagcagggctaggtcggcgacaacgcgctcggctaatatggcctgctgcacctgcgtgagggtagactggaagtcatccatgtccacaaagcggtggtatgcgcccgtgttgatggtgtaagtgcagttggccataacggaccagttaacggtctggtgacccggctgcgagagctcggtgtacctgagacgcgagtaagccctcgagtcaaatacgtagtcgttgcaagtccgcaccaggtactggtatcccaccaaaaagtgcggcggcggctggcggtagaggggccagcgtagggtggccggggctccgggggcgagatcttccaacataaggcgatgatatccgtagatgtacctggacatccaggtgatgccggcggcggtggtggaggcgcgcggaaagtcgcggacgcggttccagatgttgcgcagcggcaaaaagtgctccatggtcgggacgctctggccggtcaggcgcgcgcaatcgttgacgctctagcgtgcaaaaggagagcctgtaagcgggcactcttccgtggtctggtggataaattcgcaagggtatcatggcggacgaccggggttcgagccccgtatccggccgtccgccgtgatccatgcggttaccgcccgcgtgtcgaacccaggtgtgcgacgtcagacaacgggggagtgctccttttggcttccttccaggcgcggcggctgctgcgctagcttttttggccactggccgcgcgcagcgtaagcggttaggctggaaagcgaaagcattaagtggctcgctccctgtagccggagggttattttccaagggttgagtcgcgggacccccggttcgagtctcggaccgagactgggggcgtacactggatggcctttgcctggaacccgcactcaaaaacatgctacctctttgagccctttggcttttctgaccagcgactcaagcaggtttaccagtttgagtacgagtcactcctgcgccgtagcgccattgcttcttcccccgaccgctgtataacgctggaaaagtccacccaaagcgtacaggggcccaactcggccgcctgtggactattctgctgcatgtttctccacgcctttgccaactggccccaaactcccatggatcacaaccccaccatgaaccttattaccggggtacccaactccatgctcaacagtccccaggtacagcccaccctgcgtcgcaaccaggaacagctctacagcttcctggagcgccactcgccctacttccgcagccacagtgcgcagattaggagcgccacttctttttgtcacttgaaaaacatgtaaaaataatgtactagagacactttcaataaaggcaaatgcttttatttgtacactctcgggtgattatttacccccacccttgccgtctgcgccgtttaaaaatcaaaggggttctgccgcgcatcgctatgcgccactggcagggacacgttgcgatactggtgtttagtgctccacttaaactcaggcacaaccatccgcggcagctcggtgaagttttcactccacaggctgcgcaccatcaccaacgcgtttagcaggtcgggcgccgatatcttgaagtcgcagttggggcctccgccctgcgcgcgcgagttgcgatacacagggttgcagcactggaacactatcagcgccgggtggtgcacgctggccagcacgctcttgtcggagatcagatccgcgtccaggtcctccgcgttgctcagggcgaacggagtcaactttggtagctgccttcccaaaaagggcgcgtgcccaggctttgagttgcactcgcaccgtagtggcatcaaaaggtgaccgtgcccggtctgggcgttaggatacagcgcctgcataaaagccttgatctgcttaaaagccacctgagcctttgcgccttcagagaagaacatgccgcaagacttgccggaaaactgattggccggacaggccgcgtcgtgcacgcagcaccttgcgtcggtgttggagatctgcaccacatttcggccccaccggttcttcacgatcttggccttgctagactgctccttcagcgcgcgctgcccgttttcgctcgtcacatccatttcaatcacgtgctccttatttatcataatgcttccgtgtagacacttaagctcgccttcgatctcagcgcagcggtgcagccacaacgcgcagcccgtgggctcgtgatgcttgtaggtcacctctgcaaacgactgcaggtacgcctgcaggaatcgccccatcatcgtcacaaaggtcttgttgctggtgaaggtcagctgcaacccgcggtgctcctcgttcagccaggtcttgcatacggccgccagagcttccacttggtcaggcagtagtttgaagttcgcctttagatcgttatccacgtggtacttgtccatcagcgcgcgcgcagcctccatgcccttctcccacgcagacacgatcggcacactcagcgggttcatcaccgtaatttcactttccgcttcgctgggctcttcctcttcctcttgcgtccgcataccacgcgccactgggtcgtcttcattcagccgccgcactgtgcgcttacctcctttgccatgcttgattagcaccggtgggttgctgaaacccaccatttgtagcgccacatcttctctttcttcctcgctgtccacgattacctctggtgatggcgggcgctcgggcttgggagaagggcgcttctttttcttcttgggcgcaatggccaaatccgccgccgaggtcgatggccgcgggctgggtgtgcgcggcaccagcgcgtcttgtgatgagtcttcctcgtcctcggactcgatacgccgcctcatccgcttttttgggggcgcccggggaggcggcggcgacggggacggggacgacacgtcctccatggttgggggacgtcgcgccgcaccgcgtccgcgctcgggggtggtttcgcgctgctcctcttcccgactggccatttccttctcctataggcagaaaaagatccacaaaagcgaagatcagcttcggcgcacgctggaagacgcggaggctctcttcagtaaatactgcgcgctgactcttaaggactagtttcgcgccctttctcaaatttaagcgcgaaaactacgtcatctccagcggccacacccggcgccagcacctgttgtcagcgccattggcgcgcccgcccgccgcgcgcttcgctttttatagggccgccgccgccgccgcctcgccataaaaggaaactttcggagcgcgccgctctgattggctgccgccgcacctctccgcctcgccccgccccgcccctcgccccgccccgccccgcctggcgcgcgccccccccccccccccgcccccatcgctgcacaaaataattaaaaaataaataaatacaaaattgggggtggggaggggggggagatggggagagtgaagcagaacgtggggctcacctcgaggccggccgaatatcttcatttaaatgtttaaacatcgatgcggccgcgattaggttctacgaagaccaatcccgcccgcctaatgcggagcttaccgcctgcgtcattacccagggccacattcttggccaattgcaagccatcaacaaagcccgccaagagtttctgctacgaaagggacggggggtttacttggacccccagtccggcgaggagctcaacccaatccccccgccgccgcagccctatcagcagcagccgcgggcccttgcttcccaggatggcacccaaaaagaagctgcagctgccgccgccacccacggacgaggaggaatactgggacagtcaggcagaggaggttttggacgaggaggaggaggacatgatggaagactgggagagcctagacgaggaagcttccgaggtcgaagaggtgtcagacgaaacaccgtcaccctcggtcgcattcccctcgccggcgccccagaaatcggcaaccggttccagcatggctacaacctccgctcctcaggcgccgccggcactgcccgttcgccgacccaaccgtagatgggacaccactggaaccagggccggtaagtccaagcagccgccgccgttagcccaagagcaacaacagcgccaaggctaccgctcatggcgcgggcacaagaacgccatagttgcttgcttgcaagactgtgggggcaacatctccttcgcccgccgctttcttctctaccatcacggcgtggccttcccccgtaacatcctgcattactaccgtcatctctacagcccatactgcaccggcggcagcggcagcaacagcagcggccacacagaagcaaaggcgaccggatagcaagactctgacaaagcccaagaaatccacagcggcggcagcagcaggaggaggagcgctgcgtctggcgcccaacgaacccgtatcgacccgcgagcttagaaacaggatttttcccactctgtatgctatatttcaacagagcaggggccaagaacaagagctgaaaataaaaaacaggtctctgcgatccctcacccgcagctgcctgtatcacaaaagcgaagatcagcttcggcgcacgctggaagacgcggaggctctcttcagtaaatactgcgcgctgactcttaaggactagaataaaagatctttattttcattagatctgtgtgttggttttttgtgtggcggccgccgtttgtgttatgtttcaacgtgtttatttttcaattgcagaaaatttcaagtcatttttcattcagtagtatagccccaccaccacatagcttatacagatcaccgtaccttaatcaaactcacagaaccctagtattcaacctgccacctccctcccaacacacagagtacacagtcctttctccccggctggccttaaaaagcatcatatcatgggtaacagacatattcttaggtgttatattccacacggtttcctgtcgagccaaacgctcatcagtgatattaataaactccccgggcagctcacttaagttcatgtcgctgtccagctgctgagccacaggctgctgtccaacttgcggttgcttaacgggcggcgaaggagaagtccacgcctacatgggggtagagtcataatcgtgcatcaggatagggcggtggtgctgcagcagcgcgcgaataaactgctgccgccgccgctccgtcctgcaggaatacaacatggcagtggtctcctcagcgatgattcgcaccgcccgcagcataaggcgccttgtcctccgggcacagcagcgcaccctgatctcacttaaatcagcacagtaactgcagcacagcaccacaatattgttcaaaatcccacagtgcaaggcgctgtatccaaagctcatggcggggaccacagaacccacgtggccatcataccacaagcgcaggtagattaagtggcgacccctcataaacacgctggacataaacattacctcttttggcatgttgtaattcaccacctcccggtaccatataaacctctgattaaacatggcgccatccaccaccatcctaaaccagctggccaaaacctgcccgccggctatacactgcagggaaccgggactggaacaatgacagtggagagcccaggactcgtaaccatggatcatcatgctcgtcatgatatcaatgttggcacaacacaggcacacgtgcatacacttcctcaggattacaagctcctcccgcgttagaaccatatcccagggaacaacccattcctgaatcagcgtaaatcccacactgcagggaagacctcgcacgtaactcacgttgtgcattgtcaaagtgttacattcgggcagcagcggatgatcctccagtatggtagcgcgggtttctgtctcaaaaggaggtagacgatccctactgtacggagtgcgccgagacaaccgagatcgtgttggtcgtagtgtcatgccaaatggaacgccggacgtagtcatatttcctgaagcaaaaccaggtgcgggcgtgacaaacagatctgcgtctccggtctcgccgcttagatcgctctgtgtagtagttgtagtatatccactctctcaaagcatccaggcgccccctggcttcgggttctatgtaaactccttcatgcgccgctgccctgataacatccaccaccgcagaataagccacacccagccaacctacacattcgttctgcgagtcacacacgggaggagcgggaagagctggaagaaccatgtttttttttttattccaaaagattatccaaaacctcaaaatgaagatctattaagtgaacgcgctcccctccggtggcgtggtcaaactctacagccaaagaacagataatggcatttgtaagatgttgcacaatggcttccaaaaggcaaacggccctcacgtccaagtggacgtaaaggctaaacccttcagggtgaatctcctctataaacattccagcaccttcaaccatgcccaaataattctcatctcgccaccttctcaatatatctctaagcaaatcccgaatattaagtccggccattgtaaaaatctgctccagagcgccctccaccttcagcctcaagcagcgaatcatgattgcaaaaattcaggttcctcacagacctgtataagattcaaaagcggaacattaacaaaaataccgcgatcccgtaggtcccttcgcagggccagctgaacataatcgtgcaggtctgcacggaccagcgcggccacttccccgccaggaaccatgacaaaagaacccacactgattatgacacgcatactcggagctatgctaaccagcgtagccccgatgtaagcttgttgcatgggcggcgatataaaatgcaaggtgctgctcaaaaaatcaggcaaagcctcgcgcaaaaaagaaagcacatcgtagtcatgctcatgcagataaaggcaggtaagctccggaaccaccacagaaaaagacaccatttttctctcaaacatgtctgcgggtttctgcataaacacaaaataaaataacaaaaaaacatttaaacattagaagcctgtcttacaacaggaaaaacaacccttataagcataagacggactacggccatgccggcgtgaccgtaaaaaaactggtcaccgtgattaaaaagcaccaccgacagctcctcggtcatgtccggagtcataatgtaagactcggtaaacacatcaggttgattcacatcggtcagtgctaaaaagcgaccgaaatagcccgggggaatacatacccgcaggcgtagagacaacattacagcccccataggaggtataacaaaattaataggagagaaaaacacataaacacctgaaaaaccctcctgcctaggcaaaatagcaccctcccgctccagaacaacatacagcgcttccacagcggcagccataacagtcagccttaccagtaaaaaagaaaacctattaaaaaaacaccactcgacacggcaccagctcaatcagtcacagtgtaaaaaagggccaagtgcagagcgagtatatataggactaaaaaatgacgtaacggttaaagtccacaaaaaacacccagaaaaccgcacgcgaacctacgcccagaaacgaaagccaaaaaacccacaacttcctcaaatcgtcacttccgttttcccacgttacgtcacttcccattttaagaaaactacaattcccaacacatacaagttactccgcccttaattaaatcggatccgatatctagatgtattcgcgaggtaccgagctcgaattctctggccgtcgttttacaacgtcgtgactgggaaaaccctggcgttacccaacttaatcgccttgcagcacatccccctttcgccagctggcgtaatagcgaagaggcccgcaccgatcgcccttcccaacagttgcgcagcctgaatggcgaatggcgcctgatgcggtattttctccttacgcatctgtgcggtatttcacaccgcatatggtgcactctcagtacaatctgctctgatgccgcatagttaagccagccccgacacccgccaacacccgctgacgcgccctgacgggcttgtctgctcccggcatccgcttacagacaagctgtgaccgtctccgggagctgcatgtgtcagaggttttcaccgtcatcaccgaaacgcgcga

SEQ ID NO: 87 - DNA, 16454 bp, synthetic construct
  source 1..16454: mol_type = other DNA
tgcagctctggcccgtgtctcaaaatctctgatgttacattgcacaagataaaaatatatcatcatgaacaataaaactgtctgcttacataaacagtaatacaaggggtgttatgagccatattcaacgggaaacgtcgaggccgcgattaaattccaacatggatgctgatttatatgggtataaatgggctcgcgataatgtcgggcaatcaggtgcgacaatctatcgcttgtatgggaagcccgatgcgccagagttgtttctgaaacatggcaaaggtagcgttgccaatgatgttacagatgagatggtcagactaaactggctgacggaatttatgcctcttccgaccatcaagcattttatccgtactcctgatgatgcatggttactcaccactgcgatccccggaaaaacagcattccaggtattagaagaatatcctgattcaggtgaaaatattgttgatgcgctggcagtgttcctgcgccggttgcattcgattcctgtttgtaattgtccttttaacagcgatcgcgtatttcgtctcgctcaggcgcaatcacgaatgaataacggtttggttgatgcgagtgattttgatgacgagcgtaatggctggcctgttgaacaagtctggaaagaaatgcataaacttttgccattctcaccggattcagtcgtcactcatggtgatttctcacttgataaccttatttttgacgaggggaaattaataggttgtattgatgttggacgagtcggaatcgcagaccgataccaggatcttgccatcctatggaactgcctcggtgagttttctccttcattacagaaacggctttttcaaaaatatggtattgataatcctgatatgaataaattgcagtttcatttgatgctcgatgagtttttctaatcagaattggttaattggttgtaacattattcagattgggcttgatttaaaacttcatttttaatttaaaaggatctaggtgaagatcctttttgataatctcatgaccaaaatcccttaacgtgagttttcgttccactgagcgtcagaccccgtagaaaagatcaaaggatcttcttgagatcctttttttctgcgcgtaatctgctgcttgcaaacaaaaaaaccaccgctaccagcggtggtttgtttgccggatcaagagctaccaactctttttccgaaggtaactggcttcagcagagcgcagataccaaatactgttcttctagtgtagccgtagttaggccaccacttcaagaactctgtagcaccgcctacatacctcgctctgctaatcctgttaccagtggctgctgccagtggcgataagtcgtgtcttaccgggttggactcaagacgatagttaccggataaggcgcagcggtcgggctgaacggggggttcgtgcacacagcccagcttggagcgaacgacctacaccgaactgagatacctacagcgtgagctatgagaaagcgccacgcttcccgaagggagaaaggcggacaggtatccggtaagcggcagggtcggaacaggagagcgcacgagggagcttccagggggaaacgcctggtatctttatagtcctgtcgggtttcgccacctctgacttgagcgtcgatttttgtgatgctcgtcaggggggcggagcctatggaaaaacgccagcaacgcggcctttttacggttcctggccttttgctggccttttgctcacatgttctttcctgcgttatcccctgattctgtggataaccgtattaccgcctttgagtgagctgataccgctcgccgcagccgaacgaccgagcgcagcgagtcagtgagcgaggaagcggaagagcgcccaatacgcaaaccgcctctccccgcgcgttggccgattcattaatgcagctggcacgacaggtttcccgactggaaagcgggcagtgagcgcaacgcaattaatgtgagttagctcactcattaggcaccccaggctttacactttatgcttccggctcgtatgttgtgtggaattgtgagcggataacaatttcacacaggaaacagctatgaccatgattacaccaagcttgcatgcaggcctctgcagtcgaccagaagcaccatgtccttgggtccggcctgctgaatgcgcaggcggtcggccatgccccaggcttcgttttgacatcggcgcaggtctttgtagtagtcttgcatgagcctttctaccggcacttcttcttctccttcctcttgtcctgcatctcttgcatctatcgctgcggcggcggcggagtttggccgtaggtggcgccctcttcctcccatgcgtgtgaccccgaagcccctcatcggctgaagcagggctaggtcggcgacaacgcgctcggctaatatggcctgctgcacctgcgtgagggtagactggaagtcatccatgtccacaaagcggtggtatgcgcccgtgttgatggtgtaagtgcagttggccataacggaccagttaacggtctggtgacccggctgcgagagctcggtgtacctgagacgcgagtaagccctcgagtcaaatacgtagtcgttgcaagtccgcaccaggtactggtatcccaccaaaaagtgcggcggcggctggcggtagaggggccagcgtagggtggccggggctccgggggcgagatcttccaacataaggcgatgatatccgtagatgtacctggacatccaggtgatgccggcggcggtggtggaggcgcgcggaaagtcgcggacgcggttccagatgttgcgcagcggcaaaaagtgctccatggtcgggacgctctggccggtcaggcgcgcgcaatcgttgacgctctagcgtgcaaaaggagagcctgtaagcgggcactcttccgtggtctggtggataaattcgcaagggtatcatggcggacgaccggggttcgagccccgtatccggccgtccgccgtgatccatgcggttaccgcccgcgtgtcgaacccaggtgtgcgacgtcagacaacgggggagtgctccttttggcttccttccaggcgcggcggctgctgcgctagcttttttggccactggccgcgcgcagcgtaagcggttaggctggaaagcgaaagcattaagtggctcgctccctgtagccggagggttattttccaagggttgagtcgcgggacccccggttcgagtctcggaccgagactgggggcgtacactggatggcctttgcctggaacccgcactcaaaaacatgctacctctttgagccctttggcttttctgaccagcgactcaagcaggtttaccagtttgagtacgagtcactcctgcgccgtagcgccattgcttcttcccccgaccgctgtataacgctggaaaagtccacccaaagcgtacaggggcccaactcggccgcctgtggactattctgctgcatgtttctccacgcctttgccaactggccccaaactcccatggatcacaaccccaccatgaaccttattaccggggtacccaactccatgctcaacagtccccaggtacagcccaccctgcgtcgcaaccaggaacagctctacagcttcctggagcgccactcgccctacttccgcagccacagtgcgcagattaggagcgccacttctttttgtcacttgaaaaacatgtaaaaataatgtactagagacactttcaataaaggcaaatgcttttatttgtacactctcgggtgattatttacccccacccttgccgtctgcgccgtttaaaaatcaaaggggttctgccgcgcatcgctatgcgccactggcagggacacgttgcgatactggtgtttagtgctccacttaaactcaggcacaaccatccgcggcagctcggtgaagttttcactccacaggctgcgcaccatcaccaacgcgtttagcaggtcgggcgccgatatcttgaagtcgcagttggggcctccgccctgcgcgcgcgagttgcgatacacagggttgcagcactggaacactatcagcgccgggtggtgcacgctggccagcacgctcttgtcggagatcagatccgcgtccaggtcctccgcgttgctcagggcgaacggagtcaactttggtagctgccttcccaaaaagggcgcgtgcccaggctttgagttgcactcgcaccgtagtggcatcaaaaggtgaccgtgcccggtctgggcgttaggatacagcgcctgcataaaagccttgatctgcttaaaagccacctgagcctttgcgccttcagagaagaacatgccgcaagacttgccggaaaactgattggccggacaggccgcgtcgtgcacgcagcaccttgcgtcggtgttggagatctgcaccacatttcggccccaccggttcttcacgatcttggccttgctagactgctccttcagcgcgcgctgcccgttttcgctcgtcacatccatttcaatcacgtgctccttatttatcataatgcttccgtgtagacacttaagctcgccttcgatctcagcgcagcggtgcagccacaacgcgcagcccgtgggctcgtgatgcttgtaggtcacctctgcaaacgactgcaggtacgcctgcaggaatcgccccatcatcgtcacaaaggtcttgttgctggtgaaggtcagctgcaacccgcggtgctcctcgttcagccaggtcttgcatacggccgccagagcttccacttggtcaggcagtagtttgaagttcgcctttagatcgttatccacgtggtacttgtccatcagcgcgcgcgcagcctccatgcccttctcccacgcagacacgatcggcacactcagcgggttcatcaccgtaatttcactttccgcttcgctgggctcttcctcttcctcttgcgtccgcataccacgcgccactgggtcgtcttcattcagccgccgcactgtgcgcttacctcctttgccatgcttgattagcaccggtgggttgctgaaacccaccatttgtagcgccacatcttctctttcttcctcgctgtccacgattacctctggtgatggcgggcgctcgggcttgggagaagggcgcttctttttcttcttgggcgcaatggccaaatccgccgccgaggtcgatggccgcgggctgggtgtgcgcggcaccagcgcgtcttgtgatgagtcttcctcgtcctcggactcgatacgccgcctcatccgcttttttgggggcgcccggggaggcggcggcgacggggacggggacgacacgtcctccatggttgggggacgtcgcgccgcaccgcgtccgcgctcgggggtggtttcgcgctgctcctcttcccgactggccatttccttctcctataggcagaaaaagatccacaaaagcgaagatcagcttcggcgcacgctggaagacgcggaggctctcttcagtaaatactgcgcgctgactcttaaggactagtttcgcgccctttctcaaatttaagcgcgaaaactacgtcatctccagcggccacacccggcgccagcacctgttgtcagcgccattggcgcgcccgcccgccgcgcgcttcgctttttatagggccgccgccgccgccgcctcgccataaaaggaaactttcggagcgcgccgctctgattggctgccgccgcacctctccgcctcgccccgccccgcccctcgccccgccccgccccgcctggcgcgcgccccccccccccccccgcccccatcgctgcacaaaataattaaaaaataaataaatacaaaattgggggtggggaggggggggagatggggagagtgaagcagaacgtggggctcacctcgaggccggccgaatatcttcatttaaatgtgtgtcagttagggtgtggaaagtccccaggctccccagcaggcagaagtatgcaaagcatgcatctcaattagtcagcaaccaggtgtggaaagtccccaggctccccagcaggcagaagtatgcaaagcatgcatctcaattagtcagcaaccatagtcccgcccctaactccgcccatcccgcccctaactccgcccagttccgcccattctccgccccatggctgactaattttttttatttatgcagaggccgaggccgcctcggcctctgagctattccagaagtagtgaggaggcttttttggaggcctaggcttttgcaaacgccggcgcaccgcgggcccgatccaccggtactgttggtaaagccaccatgttttccggtggcggcggcccgctgtcccccggaggaaagtcggcggccagggcggcgtccgggttttttgcgcccgccggccctcgcggagccagccggggacccccgccttgtttgaggcaaaacttttacaacccctacctcgccccagtcgggacgcaacagaagccgaccgggccaacccagcgccatacgtactatagcgaatgcgatgaatttcgattcatcgccccgcgggtgctggacgaggatgcccccccggagaagcgcgccggggtgcacgacggtcacctcaagcgcgcccccaaggtgtactgcgggggggacgagcgcgacgtcctccgcgtcgggtcgggcggcttctggccgcggcgctcgcgcctgtggggcggcgtggaccacgccccggcggggttcaaccccaccgtcaccgtctttcacgtgtacgacatcctggagaacgtggagcacgcgtacggcatgcgcgcggcccagttccacgcgcggtttatggacgccatcacaccgacggggaccgtcatcacgctcctgggcctgactccggaaggccaccgggtggccgttcacgtttacggcacgcggcagtacttttacatgaacaaggaggaggtcgacaggcacctacaatgccgcgccccacgagatctctgcgagcgcatggccgcggccctgcgcgagtccccgggcgcgtcgttccgcggcatctccgcggaccacttcgaggcggaggtggtggagcgcaccgacgtgtactactacgagacgcgccccgctctgttttaccgcgtctacgtccgaagcgggcgcgtgctgtcgtacctgtgcgacaacttctgcccggccatcaagaagtacgagggtggggtcgacgccaccacccggttcatcctggacaaccccgggttcgtcaccttcggctggtaccgtctcaaaccgggccggaacaacacgctagcccagccgcgggccccgatggccttcgggacatccagcgacgtcgagtttaactgtacggcggacaacctggccatcgaggggggcatgagcgacctaccggcatacaagctcatgtgcttcgatatcgaatgcaaggcggggggggaggacgagctggcctttccggtggccgggcacccggaggacctggtcatccagatatcctgtctgctctacgacctgtccaccaccgccctggagcacgtcctcctgttttcgctcggttcctgcgacctccccgaatcccacctgaacgagctggcggccaggggcctgcccacgcccgtggttctggaattcgacagcgaattcgagatgctgttggccttcatgacccttgtgaaacagtacggccccgagttcgtgaccgggtacaacatcatcaacttcgactggcccttcttgctggccaagctgacggacatttacaaggtccccctggacgggtacggccgcatgaacggccggggcgtgtttcgcgtgtgggacataggccagagccacttccagaagcgcagcaagataaaggtgaacggcatggtgaacatcgacatgtacgggattataaccgacaagatcaagctctcgagctacaagctcaacgccgtggccgaagccgtcctgaaggacaagaagaaggacctgagctatcgcgacatccccgcctactacgccgccgggcccgcgcaacgcggggtgatcggcgagtactgcatacaggattccctgctggtgggccagctgttttttaagtttttgccccatctggagctctcggccgtcgcgcgcttggcgggtattaacatcacccgcaccatctacgacggccagcagatccgcgtctttacgtgcctgctgcgcctggccgaccagaagggctttattctgccggacacccaggggcgatttaggggcgccgggggggaggcgcccaagcgtccggccgcagcccgggaggacgaggagcggccagaggaggagggggaggacgaggacgaacgcgaggagggcgggggcgagcgggagccggagggcgcgcgggagaccgccggcaggcacgtggggtaccagggggccagggtccttgaccccacttccgggtttcacgtgaaccccgtggtggtgttcgactttgccagcctgtaccccagcatcatccaggcccacaacctgtgcttcagcacgctctccctgagggccgacgcagtggcgcacctggaggcgggcaaggactacctggagatcgaggtgggggggcgacggctgttcttcgtcaaggctcacgtgcgagagagcctcctcagcatcctcctgcgggactggctcgccatgcgaaagcagatccgctcgcggattccccagagcagccccgaggaggccgtgctcctggacaagcagcaggccgccatcaaggtcgtgtgtaactcggtgtacgggttcacgggagtgcagcacggactcctgccgtgcctgcacgttgccgcgacggtgacgaccatcggccgcgagatgctgctcgcgacccgcgagtacgtccacgcgcgctgggcggccttcgaacagctcctggccgatttcccggaggcggccgacatgcgcgcccccgggccctattccatgcgcatcatctacggggacacggactccatctttgtgctgtgccgcggcctcacggccgccgggctgacggccgtgggcgacaagatggcgagccacatctcgcgcgcgctgtttctgccccccatcaaactcgagtgcgaaaagacgttcaccaagctgctgctgatcgccaagaaaaagtacatcggcgtcatctacgggggtaagatgctcatcaagggcgtggatctggtgcgcaaaaacaactgcgcgtttatcaaccgcacctccagggccctggtcgacctgctgttttacgacgataccgtctccggagccgccgcggcgttagccgagcgccccgcggaggagtggctggcgcgacccctgcccgagggactgcaggcgttcggggccgtcctcgtagacgcccatcggcgcatcaccgacccggagagggacatccaggactttgtcctcaccgccgaactgagcagacacccgcgcgcgtacaccaacaagcgcctggcccacctgacggtgtattacaagctcatggcccgccgcgcgcaggtcccgtccatcaaggaccggatcccgtacgtgatcgtggcccagacccgcgaggtagaggagacggtcgcgcggctggccgccctccgcgagctagacgccgccgccccaggggacgagcccgccccccccgcggccctgccctccccggccaagcgcccccgggagacgccgtcgcctgccgaccccccgggaggcgcgtccaagccccgcaagctgctggtgtccgagctggccgaggatcccgcatacgccattgcccacggcgtcgccctgaacacggactattacttctcccacctgttgggggcggcgtgcgtgacattcaaggccctgtttgggaataacgccaagatcaccgagagtctgttaaaaaggtttattcccgaagtgtggcaccccccggacgacgtggccgcgcggctccggaccgcagggttcggggcggtgggtgccggcgctacggcggaggaaactcgtcgaatgttgcatagagcctttgatactctagcagaattcggcagtggagcaacaaacttctctctgctgaaacaagccggagatgtcgaagagaatcctggaccgacggattcccctggcggtgtggcccccgcctcccccgtggaggacgcgtcggacgcgtccctcgggcagccggaggagggggcgccctgccaggtggtcctgcagggcgccgaacttaatggaatcctacaggcgtttgccccgctgcgcacgagccttctggactcgcttctggttatgggcgaccggggcatccttatccataacacgatctttggggagcaggtgttcctgcccctggaacactcgcaattcagtcggtatcgctggcgcggacccacggcggcgttcctgtctctcgtggaccagaagcgctccctcctgagcgtgtttcgcgccaaccagtacccggacctacgtcgggtggagttggcgatcacgggccaggccccgtttcgcacgctggttcagcgcatatggacgacgacgtccgacggcgaggccgttgagctagccagcgagacgctgatgaagcgcgaactgacgagctttgtggtgctggttccccagggaacccccgacgttcagttgcgcctgacgaggccgcagctcaccaaggtccttaacgcgaccggggccgatagtgccacgcccaccacgttcgagctcggggttaacggcaaattttccgtgttcaccacgagtacctgcgtcacctttgctgcccgcgaggagggcgtgtcgtccagcaccagcacccaggtccagatcctgtccaacgcgctcaccaaggcgggccaggccgccgcgaacgccaagacggtgtacggggaaaatacccatcgcaccttctctgtggtcgtcgacgattgcagcatgcgggcggtgctccggcgactgcaggtcggcgggggcaccctcaagttcttcctcacgacccccgtccccagtctgtgcgtcaccgccaccggtcccaacgcggtatcggcggtatttctcctgaaaccccagaagatttgcctggactggctgggtcatagccaggggtctccttcagccgggagctcggcctcccgggcctctgggagcgagccaacagacagccaggactccgcgtcggacgcggtcagccacggcgatccggaagacctcgatggcgctgcccgggcgggagaggcgggggccttgcatgcctgtccgatgccgtcgtcgaccacgcgggtcactcccacgaccaagcgggggcgctcggggggcgaggatgcgcgcgcggacacggccctaaagaaacctaagacggggtcgcccaccgcacccccgcccgcagatccagtccccctggacacggaggacgactccgatgcggcggacgggacggcggcccgtcccgccgctccagacgcccggagcggaagccgttacgcgtgttactttcgcgacctcccgaccggagaagcaagccccggcgccttctccgccttccgggggggcccccaaaccccgtatggttttggattcccctgataggatccgactgcaggtagctgtgccttctagttgccagccatctgttgtttgcccctcccccgtgccttccttgaccctggaaggtgccactcccactgtcctttcctaataaaatgaggaaattgcatcgcattgtctgagtaggtgtcattctattctggggggtggggtggggcaggacagcaagggggaggattgggaagacaatagcaggcatgctggggatgcggtgggctctatgggtttaaacatcgatgcggccgcgattaggttctacgaagaccaatcccgcccgcctaatgcggagcttaccgcctgcgtcattacccagggccacattcttggccaattgcaagccatcaacaaagcccgccaagagtttctgctacgaaagggacggggggtttacttggacccccagtccggcgaggagctcaacccaatccccccgccgccgcagccctatcagcagcagccgcgggcccttgcttcccaggatggcacccaaaaagaagctgcagctgccgccgccacccacggacgaggaggaatactgggacagtcaggcagaggaggttttggacgaggaggaggaggacatgatggaagactgggagagcctagacgaggaagcttccgaggtcgaagaggtgtcagacgaaacaccgtcaccctcggtcgcattcccctcgccggcgccccagaaatcggcaaccggttccagcatggctacaacctccgctcctcaggcgccgccggcactgcccgttcgccgacccaaccgtagatgggacaccactggaaccagggccggtaagtccaagcagccgccgccgttagcccaagagcaacaacagcgccaaggctaccgctcatggcgcgggcacaagaacgccatagttgcttgcttgcaagactgtgggggcaacatctccttcgcccgccgctttcttctctaccatcacggcgtggccttcccccgtaacatcctgcattactaccgtcatctctacagcccatactgcaccggcggcagcggcagcaacagcagcggccacacagaagcaaaggcgaccggatagcaagactctgacaaagcccaagaaatccacagcggcggcagcagcaggaggaggagcgctgcgtctggcgcccaacgaacccgtatcgacccgcgagcttagaaacaggatttttcccactctgtatgctatatttcaacagagcaggggccaagaacaagagctgaaaataaaaaacaggtctctgcgatccctcacccgcagctgcctgtatcacaaaagcgaagatcagcttcggcgcacgctggaagacgcggaggctctcttcagtaaatactgcgcgctgactcttaaggactagaataaaagatctttattttcattagatctgtgtgttggttttttgtgtggcggccgccgtttgtgttatgtttcaacgtgtttatttttcaattgcagaaaatttcaagtcatttttcattcagtagtatagccccaccaccacatagcttatacagatcaccgtaccttaatcaaactcacagaaccctagtattcaacctgccacctccctcccaacacacagagtacacagtcctttctccccggctggccttaaaaagcatcatatcatgggtaacagacatattcttaggtgttatattccacacggtttcctgtcgagccaaacgctcatcagtgatattaataaactccccgggcagctcacttaagttcatgtcgctgtccagctgctgagccacaggctgctgtccaacttgcggttgcttaacgggcggcgaaggagaagtccacgcctacatgggggtagagtcataatcgtgcatcaggatagggcggtggtgctgcagcagcgcgcgaataaactgctgccgccgccgctccgtcctgcaggaatacaacatggcagtggtctcctcagcgatgattcgcaccgcccgcagcataaggcgccttgtcctccgggcacagcagcgcaccctgatctcacttaaatcagcacagtaactgcagcacagcaccacaatattgttcaaaatcccacagtgcaaggcgctgtatccaaagctcatggcggggaccacagaacccacgtggccatcataccacaagcgcaggtagattaagtggcgacccctcataaacacgctggacataaacattacctcttttggcatgttgtaattcaccacctcccggtaccatataaacctctgattaaacatggcgccatccaccaccatcctaaaccagctggccaaaacctgcccgccggctatacactgcagggaaccgggactggaacaatgacagtggagagcccaggactcgtaaccatggatcatcatgctcgtcatgatatcaatgttggcacaacacaggcacacgtgcatacacttcctcaggattacaagctcctcccgcgttagaaccatatcccagggaacaacccattcctgaatcagcgtaaatcccacactgcagggaagacctcgcacgtaactcacgttgtgcattgtcaaagtgttacattcgggcagcagcggatgatcctccagtatggtagcgcgggtttctgtctcaaaaggaggtagacgatccctactgtacggagtgcgccgagacaaccgagatcgtgttggtcgtagtgtcatgccaaatggaacgccggacgtagtcatatttcctgaagcaaaaccaggtgcgggcgtgacaaacagatctgcgtctccggtctcgccgcttagatcgctctgtgtagtagttgtagtatatccactctctcaaagcatccaggcgccccctggcttcgggttctatgtaaactccttcatgcgccgctgccctgataacatccaccaccgcagaataagccacacccagccaacctacacattcgttctgcgagtcacacacgggaggagcgggaagagctggaagaaccatgtttttttttttattccaaaagattatccaaaacctcaaaatgaagatctattaagtgaacgcgctcccctccggtggcgtggtcaaactctacagccaaagaacagataatggcatttgtaagatgttgcacaatggcttccaaaaggcaaacggccctcacgtccaagtggacgtaaaggctaaacccttcagggtgaatctcctctataaacattccagcaccttcaaccatgcccaaataattctcatctcgccaccttctcaatatatctctaagcaaatcccgaatattaagtccggccattgtaaaaatctgctccagagcgccctccaccttcagcctcaagcagcgaatcatgattgcaaaaattcaggttcctcacagacctgtataagattcaaaagcggaacattaacaaaaataccgcgatcccgtaggtcccttcgcagggccagctgaacataatcgtgcaggtctgcacggaccagcgcggccacttccccgccaggaaccatgacaaaagaacccacactgattatgacacgcatactcggagctatgctaaccagcgtagccccgatgtaagcttgttgcatgggcggcgatataaaatgcaaggtgctgctcaaaaaatcaggcaaagcctcgcgcaaaaaagaaagcacatcgtagtcatgctcatgcagataaaggcaggtaagctccggaaccaccacagaaaaagacaccatttttctctcaaacatgtctgcgggtttctgcataaacacaaaataaaataacaaaaaaacatttaaacattagaagcctgtcttacaacaggaaaaacaacccttataagcataagacggactacggccatgccggcgtgaccgtaaaaaaactggtcaccgtgattaaaaagcaccaccgacagctcctcggtcatgtccggagtcataatgtaagactcggtaaacacatcaggttgattcacatcggtcagtgctaaaaagcgaccgaaatagcccgggggaatacatacccgcaggcgtagagacaacattacagcccccataggaggtataacaaaattaataggagagaaaaacacataaacacctgaaaaaccctcctgcctaggcaaaatagcaccctcccgctccagaacaacatacagcgcttccacagcggcagccataacagtcagccttaccagtaaaaaagaaaacctattaaaaaaacaccactcgacacggcaccagctcaatcagtcacagtgtaaaaaagggccaagtgcagagcgagtatatataggactaaaaaatgacgtaacggttaaagtccacaaaaaacacccagaaaaccgcacgcgaacctacgcccagaaacgaaagccaaaaaacccacaacttcctcaaatcgtcacttccgttttcccacgttacgtcacttcccattttaagaaaactacaattcccaacacatacaagttactccgcccttaattaaatcggatccgatatctagatgtattcgcgaggtaccgagctcgaattctctggccgtcgttttacaacgtcgtgactgggaaaaccctggcgttacccaacttaatcgccttgcagcacatccccctttcgccagctggcgtaatagcgaagaggcccgcaccgatcgcccttcccaacagttgcgcagcctgaatggcgaatggcgcctgatgcggtattttctccttacgcatctgtgcggtatttcacaccgcatatggtgcactctcagtacaatctgctctgatgccgcatagttaagccagccccgacacccgccaacacccgctgacgcgccctgacgggcttgtctgctcccggcatccgcttacagacaagctgtgaccgtctccgggagctgcatgtgtcagaggttttcaccgtcatcaccgaaacgcgcga

SEQ ID NO: 88 - DNA, 10032 bp, synthetic construct
  source 1..10032: mol_type = other DNA
tgcagctctggcccgtgtctcaaaatctctgatgttacattgcacaagataaaaatatatcatcatgaacaataaaactgtctgcttacataaacagtaatacaaggggtgttatgagccatattcaacgggaaacgtcgaggccgcgattaaattccaacatggatgctgatttatatgggtataaatgggctcgcgataatgtcgggcaatcaggtgcgacaatctatcgcttgtatgggaagcccgatgcgccagagttgtttctgaaacatggcaaaggtagcgttgccaatgatgttacagatgagatggtcagactaaactggctgacggaatttatgcctcttccgaccatcaagcattttatccgtactcctgatgatgcatggttactcaccactgcgatccccggaaaaacagcattccaggtattagaagaatatcctgattcaggtgaaaatattgttgatgcgctggcagtgttcctgcgccggttgcattcgattcctgtttgtaattgtccttttaacagcgatcgcgtatttcgtctcgctcaggcgcaatcacgaatgaataacggtttggttgatgcgagtgattttgatgacgagcgtaatggctggcctgttgaacaagtctggaaagaaatgcataaacttttgccattctcaccggattcagtcgtcactcatggtgatttctcacttgataaccttatttttgacgaggggaaattaataggttgtattgatgttggacgagtcggaatcgcagaccgataccaggatcttgccatcctatggaactgcctcggtgagttttctccttcattacagaaacggctttttcaaaaatatggtattgataatcctgatatgaataaattgcagtttcatttgatgctcgatgagtttttctaatcagaattggttaattggttgtaacattattcagattgggcttgatttaaaacttcatttttaatttaaaaggatctaggtgaagatcctttttgataatctcatgaccaaaatcccttaacgtgagttttcgttccactgagcgtcagaccccgtagaaaagatcaaaggatcttcttgagatcctttttttctgcgcgtaatctgctgcttgcaaacaaaaaaaccaccgctaccagcggtggtttgtttgccggatcaagagctaccaactctttttccgaaggtaactggcttcagcagagcgcagataccaaatactgttcttctagtgtagccgtagttaggccaccacttcaagaactctgtagcaccgcctacatacctcgctctgctaatcctgttaccagtggctgctgccagtggcgataagtcgtgtcttaccgggttggactcaagacgatagttaccggataaggcgcagcggtcgggctgaacggggggttcgtgcacacagcccagcttggagcgaacgacctacaccgaactgagatacctacagcgtgagctatgagaaagcgccacgcttcccgaagggagaaaggcggacaggtatccggtaagcggcagggtcggaacaggagagcgcacgagggagcttccagggggaaacgcctggtatctttatagtcctgtcgggtttcgccacctctgacttgagcgtcgatttttgtgatgctcgtcaggggggcggagcctatggaaaaacgccagcaacgcggcctttttacggttcctggccttttgctggccttttgctcacatgttctttcctgcgttatcccctgattctgtggataaccgtattaccgcctttgagtgagctgataccgctcgccgcagccgaacgaccgagcgcagcgagtcagtgagcgaggaagcggaagagcgcccaatacgcaaaccgcctctccccgcgcgttggccgattcattaatgcagctggcacgacaggtttcccgactggaaagcgggcagtgagcgcaacgcaattaatgtgagttagctcactcattaggcaccccaggctttacactttatgcttccggctcgtatgttgtgtggaattgtgagcggataacaatttcacacaggaaacagctatgaccatgattacaccaagcttgcatgcaggcctatccgtagatgtacctggacatccaggtgatgccggcggcggtggtggaggcgcgcggaaagtcgcggacgcggttccagatgttgcgcagcggcaaaaagtgctccatggtcgggacgctctggccggtgaggcgtgcgcagtcgttgacgctctagaccgtgcaaaaggagagcctgtaagcgggcactcttccgtggtctggtggataaattcgcaagggtatcatggcggacgaccggggttcgaaccccggatccggccgtccgccgtgatccatgcggttaccgcccgcgtgtcgaacccaggtgtgcgacgtcagacaacgggggagcgctccttttggcttccttccaggcgcggcggctgctgcgctagcttttttggccactggccgcgcgcggcgtaagcggttaggctggaaagcgaaagcattaagtggctcgctccctgtagccggagggttattttccaagggttgagtcgcaggacccccggttcgagtctcgggccggccggactgcggcgaacgggggtttgcctccccgtcatgcaagaccccgcttgcaaattcctccggaaacagggacgagccccttttttgcttttcccagatgcatccggtgctgcggcagatgcgcccccctcctcagcagcggcaagagcaagagcagcggcagacatgcagggcaccctccccttctcctaccgcgtcaggaggggcaacatcgatccagacatgataagatacattgatgagtttggacaaaccacaactagaatgcagtgaaaaaaatgctttatttgtgaaatttgtgatgctattgctttatttgtaaccattataagctgcaataaacaagtttgtacactctcgggtgattatttacccccacccttgccgtctgcgccgtttaaaaatcaaaggggttctgccgcgcatcgctatgcgccactggcagggacacgttgcgatactggtgtttagtgctccacttaaactcaggcacaaccatccgcggcagctcggtgaagttttcactccacaggctgcgcaccatcaccaacgcgtttagcaggtcgggcgccgatatcttgaagtcgcagttggggcctccgccctgcgcgcgcgagttgcgatacacagggttgcagcactggaacactatcagcgccgggtggtgcacgctggccagcacgctcttgtcggagatcagatccgcgtccaggtcctccgcgttgctcagggcgaacggagtcaactttggtagctgccttcccaaaaagggcgcgtgcccaggctttgagttgcactcgcaccgtagtggcatcaaaaggtgaccgtgcccggtctgggcgttaggatacagcgcctgcataaaagccttgatctgcttaaaagccacctgagcctttgcgccttcagagaagaacatgccgcaagacttgccggaaaactgattggccggacaggccgcgtcgtgcacgcagcaccttgcgtcggtgttggagatctgcaccacatttcggccccaccggttcttcacgatcttggccttgctagactgctccttcagcgcgcgctgcccgttttcgctcgtcacatccatttcaatcacgtgctccttatttatcataatgcttccgtgtagacacttaagctcgccttcgatctcagcgcagcggtgcagccacaacgcgcagcccgtgggctcgtgatgcttgtaggtcacctctgcaaacgactgcaggtacgcctgcaggaatcgccccatcatcgtcacaaaggtcttgttgctggtgaaggtcagctgcaacccgcggtgctcctcgttcagccaggtcttgcatacggccgccagagcttccacttggtcaggcagtagtttgaagttcgcctttagatcgttatccacgtggtacttgtccatcagcgcgcgcgcagcctccatgcccttctcccacgcagacacgatcggcacactcagcgggttcatcaccgtaatttcactttccgcttcgctgggctcttcctcttcctcttgcgtccgcataccacgcgccactgggtcgtcttcattcagccgccgcactgtgcgcttacctcctttgccatgcttgattagcaccggtgggttgctgaaacccaccatttgtagcgccacatcttctctttcttcctcgctgtccacgattacctctggtgatggcgggcgctcgggcttgggagaagggcgcttctttttcttcttgggcgcaatggccaaatccgccgccgaggtcgatggccgcgggctgggtgtgcgcggcaccagcgcgtcttgtgatgagtcttcctcgtcctcggactcgatacgccgcctcatccgcttttttgggggcgcccggggaggcggcggcgacggggacggggacgacacgtcctccatggttgggggacgtcgcgccgcaccgcgtccgcgctcgggggtggtttcgcgctgctcctcttcccgactggccatttccttctcctataggcagaaaaagatcatggagtcagtcgagaagaaggacagcctaaccgccccctctgagttcgccaccaccgcctccaccgatgccgccaacgcgcctaccaccttccccgtcgaggcacccccgcttgaggaggaggaagtgattatcgagcaggacccaggttttgtaagcgaagacgacgaggaccgctcagtaccaacagaggataaaaagcaagaccaggacaacgcagaggcaaacgaggaacaagtcgggcggggggacgaaaggcatggcgactacctagatgtgggagacgacgtgctgttgaagcatctgcagcgccagtgcgccattatctgcgacgcgttgcaagagcgcagcgatgtgcccctcgccatagcggatgtcagccttgcctacgaacgccacctattctcaccgcgcgtaccccccaaacgccaagaaaacggcacatgcgagcccaacccgcgcctcaacttctaccccgtatttgccgtgccagaggtgcttgccacctatcacatctttttccaaaactgcaagatacccctatcctgccgtgccaaccgcagccgagcggacaagcagctggccttgcggcagggcgctgtcatacctgatatcgcctcgctcaacgaagtgccaaaaatctttgagggtcttggacgcgacgagaagcgcgcggcaaacgctctgcaacaggaaaacagcgaaaatgaaagtcactctggagtgttggtggaactcgagggtgacaacgcgcgcctagccgtactaaaacgcagcatcgaggtcacccactttgcctacccggcacttaacctaccccccaaggtcatgagcacagtcatgagtgagctgatcgtgcgccgtgcgcagcccctggagagggatgcaaatttgcaagaacaaacagaggagggcctacccgcagttggcgacgagcagctagcgcgctggcttcaaacgcgcgagcctgccgacttggaggagcgacgcaaactaatgatggccgcagtgctcgttaccgtggagcttgagtgcatgcagcggttctttgctgacccggagatgcagcgcaagctagaggaaacattgcactacacctttcgacagggctacgtacgccaggcctgcaagatctccaacgtggagctctgcaacctggtctcctaccttggaattttgcacgaaaaccgccttgggcaaaacgtgcttcattccacgctcaagggcgaggcgcgccgcgactacgtccgcgactgcgtttacttatttctatgctacacctggcagacggccatgggcgtttggcagcagtgcttggaggagtgcaacctcaaggagctgcagaaactgctaaagcaaaacttgaaggacctatggacggccttcaacgagcgctccgtggccgcgcacctggcggacatcattttccccgaacgcctgcttaaaaccctgcaacagggtctgccagacttcaccagtcaaagcatgttgcagaactttaggaactttatcctagagcgctcaggaatcttgcccgccacctgctgtgcacttcctagcgactttgtgcccattaagtaccgcgaatgccctccgccgctttggggccactgctaccttctgcagctagccaactaccttgcctaccactctgacataatggaagacgtgagcggtgacggtctactggagtgtcactgtcgctgcaacctatgcaccccgcaccgctccctggtttgcaattcgcagctgcttaacgaaagtcaaattatcggtacctttgagctgcagggtccctcgcctgacgaaaagtccgcggctccggggttgaaactcactccggggctgtggacgtcggcttaccttcgcaaatttgtacctgaggactaccacgcccacgagattaggttctacgaagaccaatcccgcccgcctaatgcggagcttaccgcctgcgtcattacccagggccacattcttggccaattgcaagccatcaacaaagcccgccaagagtttctgctacgaaagggacggggggtttacttggacccccagtccggcgaggagctcaacccaatccccccgccgccgcagccctatcagcagcagccgcgggcccttgcttcccaggatggcacccaaaaagaagctgcagctgccgccgccacccacggacgaggaggaatactgggacagtcaggcagaggaggttttggacgaggaggaggaggacatgatggaagactgggagagcctagacgaggaagcttccgaggtcgaagaggtgtcagacgaaacaccgtcaccctcggtcgcattcccctcgccggcgccccagaaatcggcaaccggttccagcatggctacaacctccgctcctcaggcgccgccggcactgcccgttcgccgacccaaccgtagatgggacaccactggaaccagggccggtaagtccaagcagccgccgccgttagcccaagagcaacaacagcgccaaggctaccgctcatggcgcgggcacaagaacgccatagttgcttgcttgcaagactgtgggggcaacatctccttcgcccgccgctttcttctctaccatcacggcgtggccttcccccgtaacatcctgcattactaccgtcatctctacagcccatactgcaccggcggcagcggcagcaacagcagcggccacacagaagcaaaggcgaccggatagcaagactctgacaaagcccaagaaatccacagcggcggcagcagcaggaggaggagcgctgcgtctggcgcccaacgaacccgtatcgacccgcgagcttagaaacaggatttttcccactctgtatgctatatttcaacagagcaggggccaagaacaagagctgaaaataaaaaacaggtctctgcgatccctcacccgcagctgcctgtatcacaaaagcgaagatcagcttcggcgcacgctggaagacgcggaggctctcttcagtaaatactgcgcgctgactcttaaggactagtttcgcgccctttctcaaatttaagcgcgaaaactacgtcatctccagcggccacacccggcgccagcacctgttgtcagcgccattatgagcaaggaaattcccacgccctacatgtggagttaccagccacaaatgggacttgcggctggagctgcccaagactactcaacccgaataaactacatgagcgcggggcggccgcaacttgtttattgcagcttataatggttacaaataaagcaatagcatcacaaatttcacaaataaagcatttttttcactgcattctagttgtggtttgtccaaactcatcaatgtatcttagcttaacgggcggcgaaggagaagtccacgcctacatgggggtagagtcataatcgtgcatcaggatagggcggtggtgctgcagcagcgcgcgaataaactgctgccgccgccgctccgtcctgcaggaatacaacatggcagtggtctcctcagcgatgattcgcaccgcccgcagcataaggcgccttgtcctccgggcacagcagcgcaccctgatctcacttaaatcagcacagtaactgcagcacagcaccacaatattgttcaaaatcccacagtgcaaggcgctgtatccaaagctcatggcggggaccacagaacccacgtggccatcataccacaagcgcaggtagattaagtggcgacccctcataaacacgctggacataaacattacctcttttggcatgttgtaattcaccacctcccggtaccatataaacctctgattaaacatggcgccatccaccaccatcctaaaccagctggccaaaacctgcccgccggctatacactgcagggaaccgggactggaacaatgacagtggagagcccaggactcgtaaccatggatcatcatgctcgtcatgatatcaatgttggcacaacacaggcacacgtgcatacacttcctcaggattacaagctcctcccgcgttagaaccatatcccagggaacaacccattcctgaatcagcgtaaatcccacactgcagggaagacctcgcacgtaactcacgttgtgcattgtcaaagtgttacattcgggcagcagcggatgatcctccagtatggtagcgcgggtttctgtctcaaaaggaggtagacgatccctactgtacggagtgcgccgagacaaccgagatcgtgttggtcgtagtgtcatgccaaatggaacgccggacgtagtcatatttcctgaagcaaaaccaggtgcgggcgtgacaaacagatctgcgtctccggtctcgccgcttagatcgctctgtgtagtagttgtagtatatccactctctcaaagcatccaggcgccccctggcttcgggttctatgtaaactccttcatgcgccgctgccctgataacatccaccaccgcagaataagccacacccagccaacctacacattcgttctgcgagtcacacacgggaggagcgggaagagctggaagaaccatggtggcatttgcaaaagcctaggcctccaaaaaagcctcctcactacttctggaatagctcagaggccgaggcggcctcggcctctgcataaataaaaaaaattagtcagccatggggcggagaatgggcggaactgggcggagttaggggcgggatgggcggagttaggggcgggactatggttgctgactaattgagatgcatgctttgcatacttctgcctgctggggagcctggggactttccacacctggttgctgactaattgagatgcatgctttgcatacttctgcctgctggggagcctggggactttccacaccctaactgacacacacgttacgtcacttcccattttaagaaaactacaattcccaacacatacaagttactccgcccttaattaaatcggatccgatatctagatgtattcgcgaggtaccgagctcgaattctctggccgtcgttttacaacgtcgtgactgggaaaaccctggcgttacccaacttaatcgccttgcagcacatccccctttcgccagctggcgtaatagcgaagaggcccgcaccgatcgcccttcccaacagttgcgcagcctgaatggcgaatggcgcctgatgcggtattttctccttacgcatctgtgcggtatttcacaccgcatatggtgcactctcagtacaatctgctctgatgccgcatagttaagccagccccgacacccgccaacacccgctgacgcgccctgacgggcttgtctgctcccggcatccgcttacagacaagctgtgaccgtctccgggagctgcatgtgtcagaggttttcaccgtcatcaccgaaacgcgcga

SEQ ID NO: 89 - DNA, 10802 bp, synthetic construct
  source 1..10802: mol_type = other DNA
tgcagctctggcccgtgtctcaaaatctctgatgttacattgcacaagataaaaatatatcatcatgaacaataaaactgtctgcttacataaacagtaatacaaggggtgttatgagccatattcaacgggaaacgtcgaggccgcgattaaattccaacatggatgctgatttatatgggtataaatgggctcgcgataatgtcgggcaatcaggtgcgacaatctatcgcttgtatgggaagcccgatgcgccagagttgtttctgaaacatggcaaaggtagcgttgccaatgatgttacagatgagatggtcagactaaactggctgacggaatttatgcctcttccgaccatcaagcattttatccgtactcctgatgatgcatggttactcaccactgcgatccccggaaaaacagcattccaggtattagaagaatatcctgattcaggtgaaaatattgttgatgcgctggcagtgttcctgcgccggttgcattcgattcctgtttgtaattgtccttttaacagcgatcgcgtatttcgtctcgctcaggcgcaatcacgaatgaataacggtttggttgatgcgagtgattttgatgacgagcgtaatggctggcctgttgaacaagtctggaaagaaatgcataaacttttgccattctcaccggattcagtcgtcactcatggtgatttctcacttgataaccttatttttgacgaggggaaattaataggttgtattgatgttggacgagtcggaatcgcagaccgataccaggatcttgccatcctatggaactgcctcggtgagttttctccttcattacagaaacggctttttcaaaaatatggtattgataatcctgatatgaataaattgcagtttcatttgatgctcgatgagtttttctaatcagaattggttaattggttgtaacattattcagattgggcttgatttaaaacttcatttttaatttaaaaggatctaggtgaagatcctttttgataatctcatgaccaaaatcccttaacgtgagttttcgttccactgagcgtcagaccccgtagaaaagatcaaaggatcttcttgagatcctttttttctgcgcgtaatctgctgcttgcaaacaaaaaaaccaccgctaccagcggtggtttgtttgccggatcaagagctaccaactctttttccgaaggtaactggcttcagcagagcgcagataccaaatactgttcttctagtgtagccgtagttaggccaccacttcaagaactctgtagcaccgcctacatacctcgctctgctaatcctgttaccagtggctgctgccagtggcgataagtcgtgtcttaccgggttggactcaagacgatagttaccggataaggcgcagcggtcgggctgaacggggggttcgtgcacacagcccagcttggagcgaacgacctacaccgaactgagatacctacagcgtgagctatgagaaagcgccacgcttcccgaagggagaaaggcggacaggtatccggtaagcggcagggtcggaacaggagagcgcacgagggagcttccagggggaaacgcctggtatctttatagtcctgtcgggtttcgccacctctgacttgagcgtcgatttttgtgatgctcgtcaggggggcggagcctatggaaaaacgccagcaacgcggcctttttacggttcctggccttttgctggccttttgctcacatgttctttcctgcgttatcccctgattctgtggataaccgtattaccgcctttgagtgagctgataccgctcgccgcagccgaacgaccgagcgcagcgagtcagtgagcgaggaagcggaagagcgcccaatacgcaaaccgcctctccccgcgcgttggccgattcattaatgcagctggcacgacaggtttcccgactggaaagcgggcagtgagcgcaacgcaattaatgtgagttagctcactcattaggcaccccaggctttacactttatgcttccggctcgtatgttgtgtggaattgtgagcggataacaatttcacacaggaaacagctatgaccatgattacaccaagcttgcatgcaggcctctgcagtcgaccagaagcaccatgtccttgggtccggcctgctgaatgcgcaggcggtcggccatgccccaggcttcgttttgacatcggcgcaggtctttgtagtagtcttgcatgagcctttctaccggcacttcttcttctccttcctcttgtcctgcatctcttgcatctatcgctgcggcggcggcggagtttggccgtaggtggcgccctcttcctcccatgcgtgtgaccccgaagcccctcatcggctgaagcagggctaggtcggcgacaacgcgctcggctaatatggcctgctgcacctgcgtgagggtagactggaagtcatccatgtccacaaagcggtggtatgcgcccgtgttgatggtgtaagtgcagttggccataacggaccagttaacggtctggtgacccggctgcgagagctcggtgtacctgagacgcgagtaagccctcgagtcaaatacgtagtcgttgcaagtccgcaccaggtactggtatcccaccaaaaagtgcggcggcggctggcggtagaggggccagcgtagggtggccggggctccgggggcgagatcttccaacataaggcgatgatatccgtagatgtacctggacatccaggtgatgccggcggcggtggtggaggcgcgcggaaagtcgcggacgcggttccagatgttgcgcagcggcaaaaagtgctccatggtcgggacgctctggccggtcaggcgcgcgcaatcgttgacgctctagcgtgcaaaaggagagcctgtaagcgggcactcttccgtggtctggtggataaattcgcaagggtatcatggcggacgaccggggttcgagccccgtatccggccgtccgccgtgatccatgcggttaccgcccgcgtgtcgaacccaggtgtgcgacgtcagacaacgggggagtgctccttttggcttccttccaggcgcggcggctgctgcgctagcttttttggccactggccgcgcgcagcgtaagcggttaggctggaaagcgaaagcattaagtggctcgctccctgtagccggagggttattttccaagggttgagtcgcgggacccccggttcgagtctcggaccgagactgggggcgtacactggatggcctttgcctggaacccgcactcaaaaacatgctacctctttgagccctttggcttttctgaccagcgactcaagcaggtttaccagtttgagtacgagtcactcctgcgccgtagcgccattgcttcttcccccgaccgctgtataacgctggaaaagtccacccaaagcgtacaggggcccaactcggccgcctgtggactattctgctgcatgtttctccacgcctttgccaactggccccaaactcccatggatcacaaccccaccatgaaccttattaccggggtacccaactccatgctcaacagtccccaggtacagcccaccctgcgtcgcaaccaggaacagctctacagcttcctggagcgccactcgccctacttccgcagccacagtgcgcagattaggagcgccacttctttttgtcacttgaaaaacatgtaaaaataatgtactagagacactttcaataaaggcaaatgcttttatttgtacactctcgggtgattatttacccccacccttgccgtctgcgccgtttaaaaatcaaaggggttctgccgcgcatcgctatgcgccactggcagggacacgttgcgatactggtgtttagtgctccacttaaactcaggcacaaccatccgcggcagctcggtgaagttttcactccacaggctgcgcaccatcaccaacgcgtttagcaggtcgggcgccgatatcttgaagtcgcagttggggcctccgccctgcgcgcgcgagttgcgatacacagggttgcagcactggaacactatcagcgccgggtggtgcacgctggccagcacgctcttgtcggagatcagatccgcgtccaggtcctccgcgttgctcagggcgaacggagtcaactttggtagctgccttcccaaaaagggcgcgtgcccaggctttgagttgcactcgcaccgtagtggcatcaaaaggtgaccgtgcccggtctgggcgttaggatacagcgcctgcataaaagccttgatctgcttaaaagccacctgagcctttgcgccttcagagaagaacatgccgcaagacttgccggaaaactgattggccggacaggccgcgtcgtgcacgcagcaccttgcgtcggtgttggagatctgcaccacatttcggccccaccggttcttcacgatcttggccttgctagactgctccttcagcgcgcgctgcccgttttcgctcgtcacatccatttcaatcacgtgctccttatttatcataatgcttccgtgtagacacttaagctcgccttcgatctcagcgcagcggtgcagccacaacgcgcagcccgtgggctcgtgatgcttgtaggtcacctctgcaaacgactgcaggtacgcctgcaggaatcgccccatcatcgtcacaaaggtcttgttgctggtgaaggtcagctgcaacccgcggtgctcctcgttcagccaggtcttgcatacggccgccagagcttccacttggtcaggcagtagtttgaagttcgcctttagatcgttatccacgtggtacttgtccatcagcgcgcgcgcagcctccatgcccttctcccacgcagacacgatcggcacactcagcgggttcatcaccgtaatttcactttccgcttcgctgggctcttcctcttcctcttgcgtccgcataccacgcgccactgggtcgtcttcattcagccgccgcactgtgcgcttacctcctttgccatgcttgattagcaccggtgggttgctgaaacccaccatttgtagcgccacatcttctctttcttcctcgctgtccacgattacctctggtgatggcgggcgctcgggcttgggagaagggcgcttctttttcttcttgggcgcaatggccaaatccgccgccgaggtcgatggccgcgggctgggtgtgcgcggcaccagcgcgtcttgtgatgagtcttcctcgtcctcggactcgatacgccgcctcatccgcttttttgggggcgcccggggaggcggcggcgacggggacggggacgacacgtcctccatggttgggggacgtcgcgccgcaccgcgtccgcgctcgggggtggtttcgcgctgctcctcttcccgactggccatggtggcttccttctcctataggcagaaaaagggcgcgccatccgcccgccgcgcgcttcgctttttatagggccgccgccgccgccgcctcgccataaaaggaaactttcggagcgcgccgctctgattggctgccgccgcacctctccgcctcgccccgccccgcccctcgccccgccccgccccgcctggcgcgcgccccccccccccccccgcccccatcgctgcacaaaataattaaaaaataaataaatacaaaattgggggtggggaggggggggagatggggagagtgaagcagaacgtggggctcacctcgaccatggtaatagcgatgactaatacgtagatgtactgccaagtaggaaagtcccgtaaggtcatgtactgggcataatgccaggcgggccatttaccgtcattgacgtcaatagggggcggacttggcatatgatacacttgatgtactgccaagtgggcagtttaccgtaaatactccacccattgacgtcaatggaaagtccctattggcgttactatgggaacatacgtcattattgacgtcaatgggcgggggtcgttgggcggtcagccaggcgggccatttaccgtaagttatgtaacgcggaactccatatatgggctatgaactaatgaccccgtaattgattactattaataactagtcaataatcaatgccggccggccgaatatcttcatttaaatgtttaaacatcgatgcggccgcgattaggttctacgaagaccaatcccgcccgcctaatgcggagcttaccgcctgcgtcattacccagggccacattcttggccaattgcaagccatcaacaaagcccgccaagagtttctgctacgaaagggacggggggtttacttggacccccagtccggcgaggagctcaacccaatccccccgccgccgcagccctatcagcagcagccgcgggcccttgcttcccaggatggcacccaaaaagaagctgcagctgccgccgccacccacggacgaggaggaatactgggacagtcaggcagaggaggttttggacgaggaggaggaggacatgatggaagactgggagagcctagacgaggaagcttccgaggtcgaagaggtgtcagacgaaacaccgtcaccctcggtcgcattcccctcgccggcgccccagaaatcggcaaccggttccagcatggctacaacctccgctcctcaggcgccgccggcactgcccgttcgccgacccaaccgtagatgggacaccactggaaccagggccggtaagtccaagcagccgccgccgttagcccaagagcaacaacagcgccaaggctaccgctcatggcgcgggcacaagaacgccatagttgcttgcttgcaagactgtgggggcaacatctccttcgcccgccgctttcttctctaccatcacggcgtggccttcccccgtaacatcctgcattactaccgtcatctctacagcccatactgcaccggcggcagcggcagcaacagcagcggccacacagaagcaaaggcgaccggatagcaagactctgacaaagcccaagaaatccacagcggcggcagcagcaggaggaggagcgctgcgtctggcgcccaacgaacccgtatcgacccgcgagcttagaaacaggatttttcccactctgtatgctatatttcaacagagcaggggccaagaacaagagctgaaaataaaaaacaggtctctgcgatccctcacccgcagctgcctgtatcacaaaagcgaagatcagcttcggcgcacgctggaagacgcggaggctctcttcagtaaatactgcgcgctgactcttaaggactagaataaaagatctttattttcattagatctgtgtgttggttttttgtgtggcggccgccgtttgtgttatgtttcaacgtgtttatttttcaattgcagaaaatttcaagtcatttttcattcagtagtatagccccaccaccacatagcttatacagatcaccgtaccttaatcaaactcacagaaccctagtattcaacctgccacctccctcccaacacacagagtacacagtcctttctccccggctggccttaaaaagcatcatatcatgggtaacagacatattcttaggtgttatattccacacggtttcctgtcgagccaaacgctcatcagtgatattaataaactccccgggcagctcacttaagttcatgtcgctgtccagctgctgagccacaggctgctgtccaacttgcggttgcttaacgggcggcgaaggagaagtccacgcctacatgggggtagagtcataatcgtgcatcaggatagggcggtggtgctgcagcagcgcgcgaataaactgctgccgccgccgctccgtcctgcaggaatacaacatggcagtggtctcctcagcgatgattcgcaccgcccgcagcataaggcgccttgtcctccgggcacagcagcgcaccctgatctcacttaaatcagcacagtaactgcagcacagcaccacaatattgttcaaaatcccacagtgcaaggcgctgtatccaaagctcatggcggggaccacagaacccacgtggccatcataccacaagcgcaggtagattaagtggcgacccctcataaacacgctggacataaacattacctcttttggcatgttgtaattcaccacctcccggtaccatataaacctctgattaaacatggcgccatccaccaccatcctaaaccagctggccaaaacctgcccgccggctatacactgcagggaaccgggactggaacaatgacagtggagagcccaggactcgtaaccatggatcatcatgctcgtcatgatatcaatgttggcacaacacaggcacacgtgcatacacttcctcaggattacaagctcctcccgcgttagaaccatatcccagggaacaacccattcctgaatcagcgtaaatcccacactgcagggaagacctcgcacgtaactcacgttgtgcattgtcaaagtgttacattcgggcagcagcggatgatcctccagtatggtagcgcgggtttctgtctcaaaaggaggtagacgatccctactgtacggagtgcgccgagacaaccgagatcgtgttggtcgtagtgtcatgccaaatggaacgccggacgtagtcatatttcctgaagcaaaaccaggtgcgggcgtgacaaacagatctgcgtctccggtctcgccgcttagatcgctctgtgtagtagttgtagtatatccactctctcaaagcatccaggcgccccctggcttcgggttctatgtaaactccttcatgcgccgctgccctgataacatccaccaccgcagaataagccacacccagccaacctacacattcgttctgcgagtcacacacgggaggagcgggaagagctggaagaaccatgtttttttttttattccaaaagattatccaaaacctcaaaatgaagatctattaagtgaacgcgctcccctccggtggcgtggtcaaactctacagccaaagaacagataatggcatttgtaagatgttgcacaatggcttccaaaaggcaaacggccctcacgtccaagtggacgtaaaggctaaacccttcagggtgaatctcctctataaacattccagcaccttcaaccatgcccaaataattctcatctcgccaccttctcaatatatctctaagcaaatcccgaatattaagtccggccattgtaaaaatctgctccagagcgccctccaccttcagcctcaagcagcgaatcatgattgcaaaaattcaggttcctcacagacctgtataagattcaaaagcggaacattaacaaaaataccgcgatcccgtaggtcccttcgcagggccagctgaacataatcgtgcaggtctgcacggaccagcgcggccacttccccgccaggaaccatgacaaaagaacccacactgattatgacacgcatactcggagctatgctaaccagcgtagccccgatgtaagcttgttgcatgggcggcgatataaaatgcaaggtgctgctcaaaaaatcaggcaaagcctcgcgcaaaaaagaaagcacatcgtagtcatgctcatgcagataaaggcaggtaagctccggaaccaccacagaaaaagacaccatttttctctcaaacatgtctgcgggtttctgcataaacacaaaataaaataacaaaaaaacatttaaacattagaagcctgtcttacaacaggaaaaacaacccttataagcataagacggactacggccatgccggcgtgaccgtaaaaaaactggtcaccgtgattaaaaagcaccaccgacagctcctcggtcatgtccggagtcataatgtaagactcggtaaacacatcaggttgattcacatcggtcagtgctaaaaagcgaccgaaatagcccgggggaatacatacccgcaggcgtagagacaacattacagcccccataggaggtataacaaaattaataggagagaaaaacacataaacacctgaaaaaccctcctgcctaggcaaaatagcaccctcccgctccagaacaacatacagcgcttccacagcggcagccataacagtcagccttaccagtaaaaaagaaaacctattaaaaaaacaccactcgacacggcaccagctcaatcagtcacagtgtaaaaaagggccaagtgcagagcgagtatatataggactaaaaaatgacgtaacggttaaagtccacaaaaaacacccagaaaaccgcacgcgaacctacgcccagaaacgaaagccaaaaaacccacaacttcctcaaatcgtcacttccgttttcccacgttacgtcacttcccattttaagaaaactacaattcccaacacatacaagttactccgcccttaattaaatcggatccgatatctagatgtattcgcgaggtaccgagctcgaattctctggccgtcgttttacaacgtcgtgactgggaaaaccctggcgttacccaacttaatcgccttgcagcacatccccctttcgccagctggcgtaatagcgaagaggcccgcaccgatcgcccttcccaacagttgcgcagcctgaatggcgaatggcgcctgatgcggtattttctccttacgcatctgtgcggtatttcacaccgcatatggtgcactctcagtacaatctgctctgatgccgcatagttaagccagccccgacacccgccaacacccgctgacgcgccctgacgggcttgtctgctcccggcatccgcttacagacaagctgtgaccgtctccgggagctgcatgtgtcagaggttttcaccgtcatcaccgaaacgcgcga

SEQ ID NO: 90 - DNA, 10935 bp, synthetic construct
  source 1..10935: mol_type = other DNA
tgcagctctggcccgtgtctcaaaatctctgatgttacattgcacaagataaaaatatatcatcatgaacaataaaactgtctgcttacataaacagtaatacaaggggtgttatgagccatattcaacgggaaacgtcgaggccgcgattaaattccaacatggatgctgatttatatgggtataaatgggctcgcgataatgtcgggcaatcaggtgcgacaatctatcgcttgtatgggaagcccgatgcgccagagttgtttctgaaacatggcaaaggtagcgttgccaatgatgttacagatgagatggtcagactaaactggctgacggaatttatgcctcttccgaccatcaagcattttatccgtactcctgatgatgcatggttactcaccactgcgatccccggaaaaacagcattccaggtattagaagaatatcctgattcaggtgaaaatattgttgatgcgctggcagtgttcctgcgccggttgcattcgattcctgtttgtaattgtccttttaacagcgatcgcgtatttcgtctcgctcaggcgcaatcacgaatgaataacggtttggttgatgcgagtgattttgatgacgagcgtaatggctggcctgttgaacaagtctggaaagaaatgcataaacttttgccattctcaccggattcagtcgtcactcatggtgatttctcacttgataaccttatttttgacgaggggaaattaataggttgtattgatgttggacgagtcggaatcgcagaccgataccaggatcttgccatcctatggaactgcctcggtgagttttctccttcattacagaaacggctttttcaaaaatatggtattgataatcctgatatgaataaattgcagtttcatttgatgctcgatgagtttttctaatcagaattggttaattggttgtaacattattcagattgggcttgatttaaaacttcatttttaatttaaaaggatctaggtgaagatcctttttgataatctcatgaccaaaatcccttaacgtgagttttcgttccactgagcgtcagaccccgtagaaaagatcaaaggatcttcttgagatcctttttttctgcgcgtaatctgctgcttgcaaacaaaaaaaccaccgctaccagcggtggtttgtttgccggatcaagagctaccaactctttttccgaaggtaactggcttcagcagagcgcagataccaaatactgttcttctagtgtagccgtagttaggccaccacttcaagaactctgtagcaccgcctacatacctcgctctgctaatcctgttaccagtggctgctgccagtggcgataagtcgtgtcttaccgggttggactcaagacgatagttaccggataaggcgcagcggtcgggctgaacggggggttcgtgcacacagcccagcttggagcgaacgacctacaccgaactgagatacctacagcgtgagctatgagaaagcgccacgcttcccgaagggagaaaggcggacaggtatccggtaagcggcagggtcggaacaggagagcgcacgagggagcttccagggggaaacgcctggtatctttatagtcctgtcgggtttcgccacctctgacttgagcgtcgatttttgtgatgctcgtcaggggggcggagcctatggaaaaacgccagcaacgcggcctttttacggttcctggccttttgctggccttttgctcacatgttctttcctgcgttatcccctgattctgtggataaccgtattaccgcctttgagtgagctgataccgctcgccgcagccgaacgaccgagcgcagcgagtcagtgagcgaggaagcggaagagcgcccaatacgcaaaccgcctctccccgcgcgttggccgattcattaatgcagctggcacgacaggtttcccgactggaaagcgggcagtgagcgcaacgcaattaatgtgagttagctcactcattaggcaccccaggctttacactttatgcttccggctcgtatgttgtgtggaattgtgagcggataacaatttcacacaggaaacagctatgaccatgattacaccaagcttgcatgcaggcctctgcagtcgaccagaagcaccatgtccttgggtccggcctgctgaatgcgcaggcggtcggccatgccccaggcttcgttttgacatcggcgcaggtctttgtagtagtcttgcatgagcctttctaccggcacttcttcttctccttcctcttgtcctgcatctcttgcatctatcgctgcggcggcggcggagtttggccgtaggtggcgccctcttcctcccatgcgtgtgaccccgaagcccctcatcggctgaagcagggctaggtcggcgacaacgcgctcggctaatatggcctgctgcacctgcgtgagggtagactggaagtcatccatgtccacaaagcggtggtatgcgcccgtgttgatggtgtaagtgcagttggccataacggaccagttaacggtctggtgacccggctgcgagagctcggtgtacctgagacgcgagtaagccctcgagtcaaatacgtagtcgttgcaagtccgcaccaggtactggtatcccaccaaaaagtgcggcggcggctggcggtagaggggccagcgtagggtggccggggctccgggggcgagatcttccaacataaggcgatgatatccgtagatgtacctggacatccaggtgatgccggcggcggtggtggaggcgcgcggaaagtcgcggacgcggttccagatgttgcgcagcggcaaaaagtgctccatggtcgggacgctctggccggtcaggcgcgcgcaatcgttgacgctctagcgtgcaaaaggagagcctgtaagcgggcactcttccgtggtctggtggataaattcgcaagggtatcatggcggacgaccggggttcgagccccgtatccggccgtccgccgtgatccatgcggttaccgcccgcgtgtcgaacccaggtgtgcgacgtcagacaacgggggagtgctccttttggcttccttccaggcgcggcggctgctgcgctagcttttttggccactggccgcgcgcagcgtaagcggttaggctggaaagcgaaagcattaagtggctcgctccctgtagccggagggttattttccaagggttgagtcgcgggacccccggttcgagtctcggaccgagactgggggcgtacactggatggcctttgcctggaacccgcactcaaaaacatgctacctctttgagccctttggcttttctgaccagcgactcaagcaggtttaccagtttgagtacgagtcactcctgcgccgtagcgccattgcttcttcccccgaccgctgtataacgctggaaaagtccacccaaagcgtacaggggcccaactcggccgcctgtggactattctgctgcatgtttctccacgcctttgccaactggccccaaactcccatggatcacaaccccaccatgaaccttattaccggggtacccaactccatgctcaacagtccccaggtacagcccaccctgcgtcgcaaccaggaacagctctacagcttcctggagcgccactcgccctacttccgcagccacagtgcgcagattaggagcgccacttctttttgtcacttgaaaaacatgtaaaaataatgtactagagacactttcaataaaggcaaatgcttttatttgtacactctcgggtgattatttacccccacccttgccgtctgcgccgtttaaaaatcaaaggggttctgccgcgcatcgctatgcgccactggcagggacacgttgcgatactggtgtttagtgctccacttaaactcaggcacaaccatccgcggcagctcggtgaagttttcactccacaggctgcgcaccatcaccaacgcgtttagcaggtcgggcgccgatatcttgaagtcgcagttggggcctccgccctgcgcgcgcgagttgcgatacacagggttgcagcactggaacactatcagcgccgggtggtgcacgctggccagcacgctcttgtcggagatcagatccgcgtccaggtcctccgcgttgctcagggcgaacggagtcaactttggtagctgccttcccaaaaagggcgcgtgcccaggctttgagttgcactcgcaccgtagtggcatcaaaaggtgaccgtgcccggtctgggcgttaggatacagcgcctgcataaaagccttgatctgcttaaaagccacctgagcctttgcgccttcagagaagaacatgccgcaagacttgccggaaaactgattggccggacaggccgcgtcgtgcacgcagcaccttgcgtcggtgttggagatctgcaccacatttcggccccaccggttcttcacgatcttggccttgctagactgctccttcagcgcgcgctgcccgttttcgctcgtcacatccatttcaatcacgtgctccttatttatcataatgcttccgtgtagacacttaagctcgccttcgatctcagcgcagcggtgcagccacaacgcgcagcccgtgggctcgtgatgcttgtaggtcacctctgcaaacgactgcaggtacgcctgcaggaatcgccccatcatcgtcacaaaggtcttgttgctggtgaaggtcagctgcaacccgcggtgctcctcgttcagccaggtcttgcatacggccgccagagcttccacttggtcaggcagtagtttgaagttcgcctttagatcgttatccacgtggtacttgtccatcagcgcgcgcgcagcctccatgcccttctcccacgcagacacgatcggcacactcagcgggttcatcaccgtaatttcactttccgcttcgctgggctcttcctcttcctcttgcgtccgcataccacgcgccactgggtcgtcttcattcagccgccgcactgtgcgcttacctcctttgccatgcttgattagcaccggtgggttgctgaaacccaccatttgtagcgccacatcttctctttcttcctcgctgtccacgattacctctggtgatggcgggcgctcgggcttgggagaagggcgcttctttttcttcttgggcgcaatggccaaatccgccgccgaggtcgatggccgcgggctgggtgtgcgcggcaccagcgcgtcttgtgatgagtcttcctcgtcctcggactcgatacgccgcctcatccgcttttttgggggcgcccggggaggcggcggcgacggggacggggacgacacgtcctccatggttgggggacgtcgcgccgcaccgcgtccgcgctcgggggtggtttcgcgctgctcctcttcccgactggccatggtggcttccttctcctataggcagaaaaagggcgcgccctgtggagagaaaggcaaagtggatgtcagtaagaccaataggtgcctatcagaaacgcaagagtcttctctgtctcgacaagcccagtttctattggtctccttaaacctgtcttgtaaccttgatacttacatccgcccgccgcgcgcttcgctttttatagggccgccgccgccgccgcctcgccataaaaggaaactttcggagcgcgccgctctgattggctgccgccgcacctctccgcctcgccccgccccgcccctcgccccgccccgccccgcctggcgcgcgccccccccccccccccgcccccatcgctgcacaaaataattaaaaaataaataaatacaaaattgggggtggggaggggggggagatggggagagtgaagcagaacgtggggctcacctcgaccatggtaatagcgatgactaatacgtagatgtactgccaagtaggaaagtcccgtaaggtcatgtactgggcataatgccaggcgggccatttaccgtcattgacgtcaatagggggcggacttggcatatgatacacttgatgtactgccaagtgggcagtttaccgtaaatactccacccattgacgtcaatggaaagtccctattggcgttactatgggaacatacgtcattattgacgtcaatgggcgggggtcgttgggcggtcagccaggcgggccatttaccgtaagttatgtaacgcggaactccatatatgggctatgaactaatgaccccgtaattgattactattaataactagtcaataatcaatgccggccggccgaatatcttcatttaaatgtttaaacatcgatgcggccgcgattaggttctacgaagaccaatcccgcccgcctaatgcggagcttaccgcctgcgtcattacccagggccacattcttggccaattgcaagccatcaacaaagcccgccaagagtttctgctacgaaagggacggggggtttacttggacccccagtccggcgaggagctcaacccaatccccccgccgccgcagccctatcagcagcagccgcgggcccttgcttcccaggatggcacccaaaaagaagctgcagctgccgccgccacccacggacgaggaggaatactgggacagtcaggcagaggaggttttggacgaggaggaggaggacatgatggaagactgggagagcctagacgaggaagcttccgaggtcgaagaggtgtcagacgaaacaccgtcaccctcggtcgcattcccctcgccggcgccccagaaatcggcaaccggttccagcatggctacaacctccgctcctcaggcgccgccggcactgcccgttcgccgacccaaccgtagatgggacaccactggaaccagggccggtaagtccaagcagccgccgccgttagcccaagagcaacaacagcgccaaggctaccgctcatggcgcgggcacaagaacgccatagttgcttgcttgcaagactgtgggggcaacatctccttcgcccgccgctttcttctctaccatcacggcgtggccttcccccgtaacatcctgcattactaccgtcatctctacagcccatactgcaccggcggcagcggcagcaacagcagcggccacacagaagcaaaggcgaccggatagcaagactctgacaaagcccaagaaatccacagcggcggcagcagcaggaggaggagcgctgcgtctggcgcccaacgaacccgtatcgacccgcgagcttagaaacaggatttttcccactctgtatgctatatttcaacagagcaggggccaagaacaagagctgaaaataaaaaacaggtctctgcgatccctcacccgcagctgcctgtatcacaaaagcgaagatcagcttcggcgcacgctggaagacgcggaggctctcttcagtaaatactgcgcgctgactcttaaggactagaataaaagatctttattttcattagatctgtgtgttggttttttgtgtggcggccgccgtttgtgttatgtttcaacgtgtttatttttcaattgcagaaaatttcaagtcatttttcattcagtagtatagccccaccaccacatagcttatacagatcaccgtaccttaatcaaactcacagaaccctagtattcaacctgccacctccctcccaacacacagagtacacagtcctttctccccggctggccttaaaaagcatcatatcatgggtaacagacatattcttaggtgttatattccacacggtttcctgtcgagccaaacgctcatcagtgatattaataaactccccgggcagctcacttaagttcatgtcgctgtccagctgctgagccacaggctgctgtccaacttgcggttgcttaacgggcggcgaaggagaagtccacgcctacatgggggtagagtcataatcgtgcatcaggatagggcggtggtgctgcagcagcgcgcgaataaactgctgccgccgccgctccgtcctgcaggaatacaacatggcagtggtctcctcagcgatgattcgcaccgcccgcagcataaggcgccttgtcctccgggcacagcagcgcaccctgatctcacttaaatcagcacagtaactgcagcacagcaccacaatattgttcaaaatcccacagtgcaaggcgctgtatccaaagctcatggcggggaccacagaacccacgtggccatcataccacaagcgcaggtagattaagtggcgacccctcataaacacgctggacataaacattacctcttttggcatgttgtaattcaccacctcccggtaccatataaacctctgattaaacatggcgccatccaccaccatcctaaaccagctggccaaaacctgcccgccggctatacactgcagggaaccgggactggaacaatgacagtggagagcccaggactcgtaaccatggatcatcatgctcgtcatgatatcaatgttggcacaacacaggcacacgtgcatacacttcctcaggattacaagctcctcccgcgttagaaccatatcccagggaacaacccattcctgaatcagcgtaaatcccacactgcagggaagacctcgcacgtaactcacgttgtgcattgtcaaagtgttacattcgggcagcagcggatgatcctccagtatggtagcgcgggtttctgtctcaaaaggaggtagacgatccctactgtacggagtgcgccgagacaaccgagatcgtgttggtcgtagtgtcatgccaaatggaacgccggacgtagtcatatttcctgaagcaaaaccaggtgcgggcgtgacaaacagatctgcgtctccggtctcgccgcttagatcgctctgtgtagtagttgtagtatatccactctctcaaagcatccaggcgccccctggcttcgggttctatgtaaactccttcatgcgccgctgccctgataacatccaccaccgcagaataagccacacccagccaacctacacattcgttctgcgagtcacacacgggaggagcgggaagagctggaagaaccatgtttttttttttattccaaaagattatccaaaacctcaaaatgaagatctattaagtgaacgcgctcccctccggtggcgtggtcaaactctacagccaaagaacagataatggcatttgtaagatgttgcacaatggcttccaaaaggcaaacggccctcacgtccaagtggacgtaaaggctaaacccttcagggtgaatctcctctataaacattccagcaccttcaaccatgcccaaataattctcatctcgccaccttctcaatatatctctaagcaaatcccgaatattaagtccggccattgtaaaaatctgctccagagcgccctccaccttcagcctcaagcagcgaatcatgattgcaaaaattcaggttcctcacagacctgtataagattcaaaagcggaacattaacaaaaataccgcgatcccgtaggtcccttcgcagggccagctgaacataatcgtgcaggtctgcacggaccagcgcggccacttccccgccaggaaccatgacaaaagaacccacactgattatgacacgcatactcggagctatgctaaccagcgtagccccgatgtaagcttgttgcatgggcggcgatataaaatgcaaggtgctgctcaaaaaatcaggcaaagcctcgcgcaaaaaagaaagcacatcgtagtcatgctcatgcagataaaggcaggtaagctccggaaccaccacagaaaaagacaccatttttctctcaaacatgtctgcgggtttctgcataaacacaaaataaaataacaaaaaaacatttaaacattagaagcctgtcttacaacaggaaaaacaacccttataagcataagacggactacggccatgccggcgtgaccgtaaaaaaactggtcaccgtgattaaaaagcaccaccgacagctcctcggtcatgtccggagtcataatgtaagactcggtaaacacatcaggttgattcacatcggtcagtgctaaaaagcgaccgaaatagcccgggggaatacatacccgcaggcgtagagacaacattacagcccccataggaggtataacaaaattaataggagagaaaaacacataaacacctgaaaaaccctcctgcctaggcaaaatagcaccctcccgctccagaacaacatacagcgcttccacagcggcagccataacagtcagccttaccagtaaaaaagaaaacctattaaaaaaacaccactcgacacggcaccagctcaatcagtcacagtgtaaaaaagggccaagtgcagagcgagtatatataggactaaaaaatgacgtaacggttaaagtccacaaaaaacacccagaaaaccgcacgcgaacctacgcccagaaacgaaagccaaaaaacccacaacttcctcaaatcgtcacttccgttttcccacgttacgtcacttcccattttaagaaaactacaattcccaacacatacaagttactccgcccttaattaaatcggatccgatatctagatgtattcgcgaggtaccgagctcgaattctctggccgtcgttttacaacgtcgtgactgggaaaaccctggcgttacccaacttaatcgccttgcagcacatccccctttcgccagctggcgtaatagcgaagaggcccgcaccgatcgcccttcccaacagttgcgcagcctgaatggcgaatggcgcctgatgcggtattttctccttacgcatctgtgcggtatttcacaccgcatatggtgcactctcagtacaatctgctctgatgccgcatagttaagccagccccgacacccgccaacacccgctgacgcgccctgacgggcttgtctgctcccggcatccgcttacagacaagctgtgaccgtctccgggagctgcatgtgtcagaggttttcaccgtcatcaccgaaacgcgcga

SEQ ID NO: 91 - DNA, 9487 bp, synthetic construct
  source 1..9487: mol_type = other DNA
tgcagctctggcccgtgtctcaaaatctctgatgttacattgcacaagataaaaatatatcatcatgaacaataaaactgtctgcttacataaacagtaatacaaggggtgttatgagccatattcaacgggaaacgtcgaggccgcgattaaattccaacatggatgctgatttatatgggtataaatgggctcgcgataatgtcgggcaatcaggtgcgacaatctatcgcttgtatgggaagcccgatgcgccagagttgtttctgaaacatggcaaaggtagcgttgccaatgatgttacagatgagatggtcagactaaactggctgacggaatttatgcctcttccgaccatcaagcattttatccgtactcctgatgatgcatggttactcaccactgcgatccccggaaaaacagcattccaggtattagaagaatatcctgattcaggtgaaaatattgttgatgcgctggcagtgttcctgcgccggttgcattcgattcctgtttgtaattgtccttttaacagcgatcgcgtatttcgtctcgctcaggcgcaatcacgaatgaataacggtttggttgatgcgagtgattttgatgacgagcgtaatggctggcctgttgaacaagtctggaaagaaatgcataaacttttgccattctcaccggattcagtcgtcactcatggtgatttctcacttgataaccttatttttgacgaggggaaattaataggttgtattgatgttggacgagtcggaatcgcagaccgataccaggatcttgccatcctatggaactgcctcggtgagttttctccttcattacagaaacggctttttcaaaaatatggtattgataatcctgatatgaataaattgcagtttcatttgatgctcgatgagtttttctaatcagaattggttaattggttgtaacattattcagattgggcttgatttaaaacttcatttttaatttaaaaggatctaggtgaagatcctttttgataatctcatgaccaaaatcccttaacgtgagttttcgttccactgagcgtcagaccccgtagaaaagatcaaaggatcttcttgagatcctttttttctgcgcgtaatctgctgcttgcaaacaaaaaaaccaccgctaccagcggtggtttgtttgccggatcaagagctaccaactctttttccgaaggtaactggcttcagcagagcgcagataccaaatactgttcttctagtgtagccgtagttaggccaccacttcaagaactctgtagcaccgcctacatacctcgctctgctaatcctgttaccagtggctgctgccagtggcgataagtcgtgtcttaccgggttggactcaagacgatagttaccggataaggcgcagcggtcgggctgaacggggggttcgtgcacacagcccagcttggagcgaacgacctacaccgaactgagatacctacagcgtgagctatgagaaagcgccacgcttcccgaagggagaaaggcggacaggtatccggtaagcggcagggtcggaacaggagagcgcacgagggagcttccagggggaaacgcctggtatctttatagtcctgtcgggtttcgccacctctgacttgagcgtcgatttttgtgatgctcgtcaggggggcggagcctatggaaaaacgccagcaacgcggcctttttacggttcctggccttttgctggccttttgctcacatgttctttcctgcgttatcccctgattctgtggataaccgtattaccgcctttgagtgagctgataccgctcgccgcagccgaacgaccgagcgcagcgagtcagtgagcgaggaagcggaagagcgcccaatacgcaaaccgcctctccccgcgcgttggccgattcattaatgcagctggcacgacaggtttcccgactggaaagcgggcagtgagcgcaacgcaattaatgtgagttagctcactcattaggcaccccaggctttacactttatgcttccggctcgtatgttgtgtggaattgtgagcggataacaatttcacacaggaaacagctatgaccatgattacaccaagcttgcatgcaggcctatccgtagatgtacctggacatccaggtgatgccggcggcggtggtggaggcgcgcggaaagtcgcggacgcggttccagatgttgcgcagcggcaaaaagtgctccatggtcgggacgctctggccggtgaggcgtgcgcagtcgttgacgctctagaccgtgcaaaaggagagcctgtaagcgggcactcttccgtggtctggtggataaattcgcaagggtatcatggcggacgaccggggttcgaaccccggatccggccgtccgccgtgatccatgcggttaccgcccgcgtgtcgaacccaggtgtgcgacgtcagacaacgggggagcgctccttttggcttccttccaggcgcggcggctgctgcgctagcttttttggccactggccgcgcgcggcgtaagcggttaggctggaaagcgaaagcattaagtggctcgctccctgtagccggagggttattttccaagggttgagtcgcaggacccccggttcgagtctcgggccggccggactgcggcgaacgggggtttgcctccccgtcatgcaagaccccgcttgcaaattcctccggaaacagggacgagccccttttttgcttttcccagatgcatccggtgctgcggcagatgcgcccccctcctcagcagcggcaagagcaagagcagcggcagacatgcagggcaccctccccttctcctaccgcgtcaggaggggcaacatcgatccagacatgataagatacattgatgagtttggacaaaccacaactagaatgcagtgaaaaaaatgctttatttgtgaaatttgtgatgctattgctttatttgtaaccattataagctgcaataaacaagtttgtacactctcgggtgattatttacccccacccttgccgtctgcgccgtttaaaaatcaaaggggttctgccgcgcatcgctatgcgccactggcagggacacgttgcgatactggtgtttagtgctccacttaaactcaggcacaaccatccgcggcagctcggtgaagttttcactccacaggctgcgcaccatcaccaacgcgtttagcaggtcgggcgccgatatcttgaagtcgcagttggggcctccgccctgcgcgcgcgagttgcgatacacagggttgcagcactggaacactatcagcgccgggtggtgcacgctggccagcacgctcttgtcggagatcagatccgcgtccaggtcctccgcgttgctcagggcgaacggagtcaactttggtagctgccttcccaaaaagggcgcgtgcccaggctttgagttgcactcgcaccgtagtggcatcaaaaggtgaccgtgcccggtctgggcgttaggatacagcgcctgcataaaagccttgatctgcttaaaagccacctgagcctttgcgccttcagagaagaacatgccgcaagacttgccggaaaactgattggccggacaggccgcgtcgtgcacgcagcaccttgcgtcggtgttggagatctgcaccacatttcggccccaccggttcttcacgatcttggccttgctagactgctccttcagcgcgcgctgcccgttttcgctcgtcacatccatttcaatcacgtgctccttatttatcataatgcttccgtgtagacacttaagctcgccttcgatctcagcgcagcggtgcagccacaacgcgcagcccgtgggctcgtgatgcttgtaggtcacctctgcaaacgactgcaggtacgcctgcaggaatcgccccatcatcgtcacaaaggtcttgttgctggtgaaggtcagctgcaacccgcggtgctcctcgttcagccaggtcttgcatacggccgccagagcttccacttggtcaggcagtagtttgaagttcgcctttagatcgttatccacgtggtacttgtccatcagcgcgcgcgcagcctccatgcccttctcccacgcagacacgatcggcacactcagcgggttcatcaccgtaatttcactttccgcttcgctgggctcttcctcttcctcttgcgtccgcataccacgcgccactgggtcgtcttcattcagccgccgcactgtgcgcttacctcctttgccatgcttgattagcaccggtgggttgctgaaacccaccatttgtagcgccacatcttctctttcttcctcgctgtccacgattacctctggtgatggcgggcgctcgggcttgggagaagggcgcttctttttcttcttgggcgcaatggccaaatccgccgccgaggtcgatggccgcgggctgggtgtgcgcggcaccagcgcgtcttgtgatgagtcttcctcgtcctcggactcgatacgccgcctcatccgcttttttgggggcgcccggggaggcggcggcgacggggacggggacgacacgtcctccatggttgggggacgtcgcgccgcaccgcgtccgcgctcgggggtggtttcgcgctgctcctcttcccgactggccatttccttctcctataggcagaaaaagatcatggagtcagtcgagaagaagggattaggttctacgaagaccaatcccgcccgcctaatgcggagcttaccgcctgcgtcattacccagggccacattcttggccaattgcaagccatcaacaaagcccgccaagagtttctgctacgaaagggacggggggtttacttggacccccagtccggcgaggagctcaacccaatccccccgccgccgcagccctatcagcagcagccgcgggcccttgcttcccaggatggcacccaaaaagaagctgcagctgccgccgccacccacggacgaggaggaatactgggacagtcaggcagaggaggttttggacgaggaggaggaggacatgatggaagactgggagagcctagacgaggaagcttccgaggtcgaagaggtgtcagacgaaacaccgtcaccctcggtcgcattcccctcgccggcgccccagaaatcggcaaccggttccagcatggctacaacctccgctcctcaggcgccgccggcactgcccgttcgccgacccaaccgtagatgggacaccactggaaccagggccggtaagtccaagcagccgccgccgttagcccaagagcaacaacagcgccaaggctaccgctcatggcgcgggcacaagaacgccatagttgcttgcttgcaagactgtgggggcaacatctccttcgcccgccgctttcttctctaccatcacggcgtggccttcccccgtaacatcctgcattactaccgtcatctctacagcccatactgcaccggcggcagcggcagcaacagcagcggccacacagaagcaaaggcgaccggatagcaagactctgacaaagcccaagaaatccacagcggcggcagcagcaggaggaggagcgctgcgtctggcgcccaacgaacccgtatcgacccgcgagcttagaaacaggatttttcccactctgtatgctatatttcaacagagcaggggccaagaacaagagctgaaaataaaaaacaggtctctgcgatccctcacccgcagctgcctgtatcacaaaagcgaagatcagcttcggcgcacgctggaagacgcggaggctctcttcagtaaatactgcgcgctgactcttaaggactagtttcgcgccctttctcaaatttaagcgcgaaaactacgtcatctccagcggccacacccggcgccagcacctgttgtcagcgccattatgagcaaggaaattcccacgccctacatgtggagttaccagccacaaatgggacttgcggctggagctgcccaagactactcaacccgaataaactacatgagcgcggggcggccgccgtttgtgttatgtttcaacgtgtttatttttcaattgcagaaaatttcaagtcatttttcattcagtagtatagccccaccaccacatagcttatacagatcaccgtaccttaatcaaactcacagaaccctagtattcaacctgccacctccctcccaacacacagagtacacagtcctttctccccggctggccttaaaaagcatcatatcatgggtaacagacatattcttaggtgttatattccacacggtttcctgtcgagccaaacgctcatcagtgatattaataaactccccgggcagctcacttaagttcatgtcgctgtccagctgctgagccacaggctgctgtccaacttgcggttgcttaacgggcggcgaaggagaagtccacgcctacatgggggtagagtcataatcgtgcatcaggatagggcggtggtgctgcagcagcgcgcgaataaactgctgccgccgccgctccgtcctgcaggaatacaacatggcagtggtctcctcagcgatgattcgcaccgcccgcagcataaggcgccttgtcctccgggcacagcagcgcaccctgatctcacttaaatcagcacagtaactgcagcacagcaccacaatattgttcaaaatcccacagtgcaaggcgctgtatccaaagctcatggcggggaccacagaacccacgtggccatcataccacaagcgcaggtagattaagtggcgacccctcataaacacgctggacataaacattacctcttttggcatgttgtaattcaccacctcccggtaccatataaacctctgattaaacatggcgccatccaccaccatcctaaaccagctggccaaaacctgcccgccggctatacactgcagggaaccgggactggaacaatgacagtggagagcccaggactcgtaaccatggatcatcatgctcgtcatgatatcaatgttggcacaacacaggcacacgtgcatacacttcctcaggattacaagctcctcccgcgttagaaccatatcccagggaacaacccattcctgaatcagcgtaaatcccacactgcagggaagacctcgcacgtaactcacgttgtgcattgtcaaagtgttacattcgggcagcagcggatgatcctccagtatggtagcgcgggtttctgtctcaaaaggaggtagacgatccctactgtacggagtgcgccgagacaaccgagatcgtgttggtcgtagtgtcatgccaaatggaacgccggacgtagtcatatttcctgaagcaaaaccaggtgcgggcgtgacaaacagatctgcgtctccggtctcgccgcttagatcgctctgtgtagtagttgtagtatatccactctctcaaagcatccaggcgccccctggcttcgggttctatgtaaactccttcatgcgccgctgccctgataacatccaccaccgcagaataagccacacccagccaacctacacattcgttctgcgagtcacacacgggaggagcgggaagagctggaagaaccatgtttttttttttattccaaaagattatccaaaacctcaaaatgaagatctattaagtgaacgcgctcccctccggtggcgtggtcaaactctacagccaaagaacagataatggcatttgtaagatgttgcacaatggcttccaaaaggcaaacggccctcacgtccaagtggacgtaaaggctaaacccttcagggtgaatctcctctataaacattccagcaccttcaaccatgcccaaataattctcatctcgccaccttctcaatatatctctaagcaaatcccgaatattaagtccggccattgtaaaaatctgctccagagcgccctccaccttcagcctcaagcagcgaatcatgattgcaaaaattcaggttcctcacagacctgtataagattcaaaagcggaacattaacaaaaataccgcgatcccgtaggtcccttcgcagggccagctgaacataatcgtgcaggtctgcacggaccagcgcggccacttccccgccaggaaccatgacaaaagaacccacactgattatgacacgcatactcggagctatgctaaccagcgtagccccgatgtaagcttgttgcatgggcggcgatataaaatgcaaggtgctgctcaaaaaatcaggcaaagcctcgcgcaaaaaagaaagcacatcgtagtcatgctcatgcagataaaggcaggtaagctccggaaccaccacagaaaaagacaccatttttctctcaaacatgtctgcgggtttctgcataaacacaaaataaaataacaaaaaaacatttaaacattagaagcctgtcttacaacaggaaaaacaacccttataagcataagacggactacggccatgccggcgtgaccgtaaaaaaactggtcaccgtgattaaaaagcaccaccgacagctcctcggtcatgtccggagtcataatgtaagactcggtaaacacatcaggttgattcacatcggtcagtgctaaaaagcgaccgaaatagcccgggggaatacatacccgcaggcgtagagacaacattacagcccccataggaggtataacaaaattaataggagagaaaaacacataaacacctgaaaaaccctcctgcctaggcaaaatagcaccctcccgctccagaacaacatacagcgcttccacagcggcagccataacagtcagccttaccagtaaaaaagaaaacctattaaaaaaacaccactcgacacggcaccagctcaatcagtcacagtgtaaaaaagggccaagtgcagagcgagtatatataggactaaaaaatgacgtaacggttaaagtccacaaaaaacacccagaaaaccgcacgcgaacctacgcccagaaacgaaagccaaaaaacccacaacttcctcaaatcgtcacttccgttttcccacgttacgtcacttcccattttaagaaaactacaattcccaacacatacaagttactccgcccttaattaaatcggatccgatatctagatgtattcgcgaggtaccgagctcgaattctctggccgtcgttttacaacgtcgtgactgggaaaaccctggcgttacccaacttaatcgccttgcagcacatccccctttcgccagctggcgtaatagcgaagaggcccgcaccgatcgcccttcccaacagttgcgcagcctgaatggcgaatggcgcctgatgcggtattttctccttacgcatctgtgcggtatttcacaccgcatatggtgcactctcagtacaatctgctctgatgccgcatagttaagccagccccgacacccgccaacacccgctgacgcgccctgacgggcttgtctgctcccggcatccgcttacagacaagctgtgaccgtctccgggagctgcatgtgtcagaggttttcaccgtcatcaccgaaacgcgcga

SEQ ID NO: 92 - DNA, 10390 bp, synthetic construct
  source 1..10390: mol_type = other DNA
tgcagctctggcccgtgtctcaaaatctctgatgttacattgcacaagataaaaatatatcatcatgaacaataaaactgtctgcttacataaacagtaatacaaggggtgttatgagccatattcaacgggaaacgtcgaggccgcgattaaattccaacatggatgctgatttatatgggtataaatgggctcgcgataatgtcgggcaatcaggtgcgacaatctatcgcttgtatgggaagcccgatgcgccagagttgtttctgaaacatggcaaaggtagcgttgccaatgatgttacagatgagatggtcagactaaactggctgacggaatttatgcctcttccgaccatcaagcattttatccgtactcctgatgatgcatggttactcaccactgcgatccccggaaaaacagcattccaggtattagaagaatatcctgattcaggtgaaaatattgttgatgcgctggcagtgttcctgcgccggttgcattcgattcctgtttgtaattgtccttttaacagcgatcgcgtatttcgtctcgctcaggcgcaatcacgaatgaataacggtttggttgatgcgagtgattttgatgacgagcgtaatggctggcctgttgaacaagtctggaaagaaatgcataaacttttgccattctcaccggattcagtcgtcactcatggtgatttctcacttgataaccttatttttgacgaggggaaattaataggttgtattgatgttggacgagtcggaatcgcagaccgataccaggatcttgccatcctatggaactgcctcggtgagttttctccttcattacagaaacggctttttcaaaaatatggtattgataatcctgatatgaataaattgcagtttcatttgatgctcgatgagtttttctaatcagaattggttaattggttgtaacattattcagattgggcttgatttaaaacttcatttttaatttaaaaggatctaggtgaagatcctttttgataatctcatgaccaaaatcccttaacgtgagttttcgttccactgagcgtcagaccccgtagaaaagatcaaaggatcttcttgagatcctttttttctgcgcgtaatctgctgcttgcaaacaaaaaaaccaccgctaccagcggtggtttgtttgccggatcaagagctaccaactctttttccgaaggtaactggcttcagcagagcgcagataccaaatactgttcttctagtgtagccgtagttaggccaccacttcaagaactctgtagcaccgcctacatacctcgctctgctaatcctgttaccagtggctgctgccagtggcgataagtcgtgtcttaccgggttggactcaagacgatagttaccggataaggcgcagcggtcgggctgaacggggggttcgtgcacacagcccagcttggagcgaacgacctacaccgaactgagatacctacagcgtgagctatgagaaagcgccacgcttcccgaagggagaaaggcggacaggtatccggtaagcggcagggtcggaacaggagagcgcacgagggagcttccagggggaaacgcctggtatctttatagtcctgtcgggtttcgccacctctgacttgagcgtcgatttttgtgatgctcgtcaggggggcggagcctatggaaaaacgccagcaacgcggcctttttacggttcctggccttttgctggccttttgctcacatgttctttcctgcgttatcccctgattctgtggataaccgtattaccgcctttgagtgagctgataccgctcgccgcagccgaacgaccgagcgcagcgagtcagtgagcgaggaagcggaagagcgcccaatacgcaaaccgcctctccccgcgcgttggccgattcattaatgcagctggcacgacaggtttcccgactggaaagcgggcagtgagcgcaacgcaattaatgtgagttagctcactcattaggcaccccaggctttacactttatgcttccggctcgtatgttgtgtggaattgtgagcggataacaatttcacacaggaaacagctatgaccatgattacaccaagcttgcatgcaggcctatccgtagatgtacctggacatccaggtgatgccggcggcggtggtggaggcgcgcggaaagtcgcggacgcggttccagatgttgcgcagcggcaaaaagtgctccatggtcgggacgctctggccggtgaggcgtgcgcagtcgttgacgctctagaccgtgcaaaaggagagcctgtaagcgggcactcttccgtggtctggtggataaattcgcaagggtatcatggcggacgaccggggttcgaaccccggatccggccgtccgccgtgatccatgcggttaccgcccgcgtgtcgaacccaggtgtgcgacgtcagacaacgggggagcgctccttttggcttccttccaggcgcggcggctgctgcgctagcttttttggccactggccgcgcgcggcgtaagcggttaggctggaaagcgaaagcattaagtggctcgctccctgtagccggagggttattttccaagggttgagtcgcaggacccccggttcgagtctcgggccggccggactgcggcgaacgggggtttgcctccccgtcatgcaagaccccgcttgcaaattcctccggaaacagggacgagccccttttttgcttttcccagatgcatccggtgctgcggcagatgcgcccccctcctcagcagcggcaagagcaagagcagcggcagacatgcagggcaccctccccttctcctaccgcgtcaggaggggcaacatcgatccagacatgataagatacattgatgagtttggacaaaccacaactagaatgcagtgaaaaaaatgctttatttgtgaaatttgtgatgctattgctttatttgtaaccattataagctgcaataaacaagtttgtacactctcgggtgattatttacccccacccttgccgtctgcgccgtttaaaaatcaaaggggttctgccgcgcatcgctatgcgccactggcagggacacgttgcgatactggtgtttagtgctccacttaaactcaggcacaaccatccgcggcagctcggtgaagttttcactccacaggctgcgcaccatcaccaacgcgtttagcaggtcgggcgccgatatcttgaagtcgcagttggggcctccgccctgcgcgcgcgagttgcgatacacagggttgcagcactggaacactatcagcgccgggtggtgcacgctggccagcacgctcttgtcggagatcagatccgcgtccaggtcctccgcgttgctcagggcgaacggagtcaactttggtagctgccttcccaaaaagggcgcgtgcccaggctttgagttgcactcgcaccgtagtggcatcaaaaggtgaccgtgcccggtctgggcgttaggatacagcgcctgcataaaagccttgatctgcttaaaagccacctgagcctttgcgccttcagagaagaacatgccgcaagacttgccggaaaactgattggccggacaggccgcgtcgtgcacgcagcaccttgcgtcggtgttggagatctgcaccacatttcggccccaccggttcttcacgatcttggccttgctagactgctccttcagcgcgcgctgcccgttttcgctcgtcacatccatttcaatcacgtgctccttatttatcataatgcttccgtgtagacacttaagctcgccttcgatctcagcgcagcggtgcagccacaacgcgcagcccgtgggctcgtgatgcttgtaggtcacctctgcaaacgactgcaggtacgcctgcaggaatcgccccatcatcgtcacaaaggtcttgttgctggtgaaggtcagctgcaacccgcggtgctcctcgttcagccaggtcttgcatacggccgccagagcttccacttggtcaggcagtagtttgaagttcgcctttagatcgttatccacgtggtacttgtccatcagcgcgcgcgcagcctccatgcccttctcccacgcagacacgatcggcacactcagcgggttcatcaccgtaatttcactttccgcttcgctgggctcttcctcttcctcttgcgtccgcataccacgcgccactgggtcgtcttcattcagccgccgcactgtgcgcttacctcctttgccatgcttgattagcaccggtgggttgctgaaacccaccatttgtagcgccacatcttctctttcttcctcgctgtccacgattacctctggtgatggcgggcgctcgggcttgggagaagggcgcttctttttcttcttgggcgcaatggccaaatccgccgccgaggtcgatggccgcgggctgggtgtgcgcggcaccagcgcgtcttgtgatgagtcttcctcgtcctcggactcgatacgccgcctcatccgcttttttgggggcgcccggggaggcggcggcgacggggacggggacgacacgtcctccatggttgggggacgtcgcgccgcaccgcgtccgcgctcgggggtggtttcgcgctgctcctcttcccgactggccatttccttctcctataggcagaaaaagatcatggagtcagtcgagaagaagggattaggttctacgaagaccaatcccgcccgcctaatgcggagcttaccggctccggtgcccgtcagtgggcagagcgcacatcgcccacagtccccgagaagttggggggaggggtcggcaattgaaccggtgcctagagaaggtggcgcggggtaaactgggaaagtgatgtcgtgtactggctccgcctttttcccgagggtgggggagaaccgtatataagtgcagtagtcgccgtgaacgttctttttcgcaacgggtttgccgccagaacacaggtaagtgccgtgtgtggttcccgcgggcctggcctctttacgggttatggcccttgcgtgccttgaattacttccacgcccctggctgcagtacgtgattcttgatcccgagcttcgggttggaagtgggtgggagagttcgaggccttgcgcttaaggagccccttcgcctcgtgcttgagttgaggcctggcctgggcgctggggccgccgcgtgcgaatctggtggcaccttcgcgcctgtctcgctgctttcgataagtctctagccatttaaaatttttgatgacctgctgcgacgctttttttctggcaagatagtcttgtaaatgcgggccaagatctgcacactggtatttcggtttttggggccgcgggcggcgacggggcccgtgcgtcccagcgcacatgttcggcgaggcggggcctgcgagcgcggccaccgagaatcggacgggggtagtctcaagctggccggcctgctctggtgcctggcctcgcgccgccgtgtatcgccccgccctgggcggcaaggctggcccggtcggcaccagttgcgtgagcggaaagatggccgcttcccggccctgctgcagggagctcaaaatggaggacgcggcgctcgggagagcgggcgggtgagtcacccacacaaaggaaaagggcctttccgtcctcagccgtcgcttcatgtgactccacggagtaccgggcgccgtccaggcacctcgattagttctcgagcttttggagtacgtcgtctttaggttggggggaggggttttatgcgatggagtttccccacactgagtgggtggagactgaagttaggccagcttggcacttgatgtaattctccttggaatttgccctttttgagtttggatcttggttcattctcaagcctcagacagtggttcaaagtttttttcttccatttcaggtgtcgtgaccgccgcagccctatcagcagcagccgcgggcccttgcttcccagggccaccatggcacccaaaaagaagctgcagctgccgccgccacccacggacgaggaggaatactgggacagtcaggcagaggaggttttggacgaggaggaggaggacatgatggaagactgggagagcctagacgaggaagcttccgaggtcgaagaggtgtcagacgaaacaccgtcaccctcggtcgcattcccctcgccggcgccccagaaatcggcaaccggttccagcatggctacaacctccgctcctcaggcgccgccggcactgcccgttcgccgacccaaccgtagatgggacaccactggaaccagggccggtaagtccaagcagccgccgccgttagcccaagagcaacaacagcgccaaggctaccgctcatggcgcgggcacaagaacgccatagttgcttgcttgcaagactgtgggggcaacatctccttcgcccgccgctttcttctctaccatcacggcgtggccttcccccgtaacatcctgcattactaccgtcatctctacagcccatactgcaccggcggcagcggcagcaacagcagcggccacacagaagcaaaggcgaccggatagcaagactctgacaaagcccaagaaatccacagcggcggcagcagcaggaggaggagcgctgcgtctggcgcccaacgaacccgtatcgacccgcgagcttagaaacaggatttttcccactctgtatgctatatttcaacagagcaggggccaagaacaagagctgaaaataaaaaacaggtctctgcgatccctcacccgcagctgcctgtatcacaaaagcgaagatcagcttcggcgcacgctggaagacgcggaggctctcttcagtaaatactgcgcgctgactcttaaggactagaataaaagatctttattttcattagatctgtgtgttggttttttgtgtggcggccgccgtttgtgttatgtttcaacgtgtttatttttcaattgcagaaaatttcaagtcatttttcattcagtagtatagccccaccaccacatagcttatacagatcaccgtaccttaatcaaactcacagaaccctagtattcaacctgccacctccctcccaacacacagagtacacagtcctttctccccggctggccttaaaaagcatcatatcatgggtaacagacatattcttaggtgttatattccacacggtttcctgtcgagccaaacgctcatcagtgatattaataaactccccgggcagctcacttaagttcatgtcgctgtccagctgctgagccacaggctgctgtccaacttgcggttgcttaacgggcggcgaaggagaagtccacgcctacatgggggtagagtcataatcgtgcatcaggatagggcggtggtgctgcagcagcgcgcgaataaactgctgccgccgccgctccgtcctgcaggaatacaacatggcagtggtctcctcagcgatgattcgcaccgcccgcagcataaggcgccttgtcctccgggcacagcagcgcaccctgatctcacttaaatcagcacagtaactgcagcacagcaccacaatattgttcaaaatcccacagtgcaaggcgctgtatccaaagctcatggcggggaccacagaacccacgtggccatcataccacaagcgcaggtagattaagtggcgacccctcataaacacgctggacataaacattacctcttttggcatgttgtaattcaccacctcccggtaccatataaacctctgattaaacatggcgccatccaccaccatcctaaaccagctggccaaaacctgcccgccggctatacactgcagggaaccgggactggaacaatgacagtggagagcccaggactcgtaaccatggatcatcatgctcgtcatgatatcaatgttggcacaacacaggcacacgtgcatacacttcctcaggattacaagctcctcccgcgttagaaccatatcccagggaacaacccattcctgaatcagcgtaaatcccacactgcagggaagacctcgcacgtaactcacgttgtgcattgtcaaagtgttacattcgggcagcagcggatgatcctccagtatggtagcgcgggtttctgtctcaaaaggaggtagacgatccctactgtacggagtgcgccgagacaaccgagatcgtgttggtcgtagtgtcatgccaaatggaacgccggacgtagtcatatttcctgaagcaaaaccaggtgcgggcgtgacaaacagatctgcgtctccggtctcgccgcttagatcgctctgtgtagtagttgtagtatatccactctctcaaagcatccaggcgccccctggcttcgggttctatgtaaactccttcatgcgccgctgccctgataacatccaccaccgcagaataagccacacccagccaacctacacattcgttctgcgagtcacacacgggaggagcgggaagagctggaagaaccatgtttttttttttattccaaaagattatccaaaacctcaaaatgaagatctattaagtgaacgcgctcccctccggtggcgtggtcaaactctacagccaaagaacagataatggcatttgtaagatgttgcacaatggcttccaaaaggcaaacggccctcacgtccaagtggacgtaaaggctaaacccttcagggtgaatctcctctataaacattccagcaccttcaaccatgcccaaataattctcatctcgccaccttctcaatatatctctaagcaaatcccgaatattaagtccggccattgtaaaaatctgctccagagcgccctccaccttcagcctcaagcagcgaatcatgattgcaaaaattcaggttcctcacagacctgtataagattcaaaagcggaacattaacaaaaataccgcgatcccgtaggtcccttcgcagggccagctgaacataatcgtgcaggtctgcacggaccagcgcggccacttccccgccaggaaccatgacaaaagaacccacactgattatgacacgcatactcggagctatgctaaccagcgtagccccgatgtaagcttgttgcatgggcggcgatataaaatgcaaggtgctgctcaaaaaatcaggcaaagcctcgcgcaaaaaagaaagcacatcgtagtcatgctcatgcagataaaggcaggtaagctccggaaccaccacagaaaaagacaccatttttctctcaaacatgtctgcgggtttctgcataaacacaaaataaaataacaaaaaaacatttaaacattagaagcctgtcttacaacaggaaaaacaacccttataagcataagacggactacggccatgccggcgtgaccgtaaaaaaactggtcaccgtgattaaaaagcaccaccgacagctcctcggtcatgtccggagtcataatgtaagactcggtaaacacatcaggttgattcacatcggtcagtgctaaaaagcgaccgaaatagcccgggggaatacatacccgcaggcgtagagacaacattacagcccccataggaggtataacaaaattaataggagagaaaaacacataaacacctgaaaaaccctcctgcctaggcaaaatagcaccctcccgctccagaacaacatacagcgcttccacagcggcagccataacagtcagccttaccagtaaaaaagaaaacctattaaaaaaacaccactcgacacggcaccagctcaatcagtcacagtgtaaaaaagggccaagtgcagagcgagtatatataggactaaaaaatgacgtaacggttaaagtccacaaaaaacacccagaaaaccgcacgcgaacctacgcccagaaacgaaagccaaaaaacccacaacttcctcaaatcgtcacttccgttttcccacgttacgtcacttcccattttaagaaaactacaattcccaacacatacaagttactccgcccttaattaaatcggatccgatatctagatgtattcgcgaggtaccgagctcgaattctctggccgtcgttttacaacgtcgtgactgggaaaaccctggcgttacccaacttaatcgccttgcagcacatccccctttcgccagctggcgtaatagcgaagaggcccgcaccgatcgcccttcccaacagttgcgcagcctgaatggcgaatggcgcctgatgcggtattttctccttacgcatctgtgcggtatttcacaccgcatatggtgcactctcagtacaatctgctctgatgccgcatagttaagccagccccgacacccgccaacacccgctgacgcgccctgacgggcttgtctgctcccggcatccgcttacagacaagctgtgaccgtctccgggagctgcatgtgtcagaggttttcaccgtcatcaccgaaacgcgcga

SEQ ID NO: 93 - DNA, 7804 bp, synthetic construct
  source 1..7804: mol_type = other DNA
tgcagctctggcccgtgtctcaaaatctctgatgttacattgcacaagataaaaatatatcatcatgaacaataaaactgtctgcttacataaacagtaatacaaggggtgttatgagccatattcaacgggaaacgtcgaggccgcgattaaattccaacatggatgctgatttatatgggtataaatgggctcgcgataatgtcgggcaatcaggtgcgacaatctatcgcttgtatgggaagcccgatgcgccagagttgtttctgaaacatggcaaaggtagcgttgccaatgatgttacagatgagatggtcagactaaactggctgacggaatttatgcctcttccgaccatcaagcattttatccgtactcctgatgatgcatggttactcaccactgcgatccccggaaaaacagcattccaggtattagaagaatatcctgattcaggtgaaaatattgttgatgcgctggcagtgttcctgcgccggttgcattcgattcctgtttgtaattgtccttttaacagcgatcgcgtatttcgtctcgctcaggcgcaatcacgaatgaataacggtttggttgatgcgagtgattttgatgacgagcgtaatggctggcctgttgaacaagtctggaaagaaatgcataaacttttgccattctcaccggattcagtcgtcactcatggtgatttctcacttgataaccttatttttgacgaggggaaattaataggttgtattgatgttggacgagtcggaatcgcagaccgataccaggatcttgccatcctatggaactgcctcggtgagttttctccttcattacagaaacggctttttcaaaaatatggtattgataatcctgatatgaataaattgcagtttcatttgatgctcgatgagtttttctaatcagaattggttaattggttgtaacattattcagattgggcttgatttaaaacttcatttttaatttaaaaggatctaggtgaagatcctttttgataatctcatgaccaaaatcccttaacgtgagttttcgttccactgagcgtcagaccccgtagaaaagatcaaaggatcttcttgagatcctttttttctgcgcgtaatctgctgcttgcaaacaaaaaaaccaccgctaccagcggtggtttgtttgccggatcaagagctaccaactctttttccgaaggtaactggcttcagcagagcgcagataccaaatactgttcttctagtgtagccgtagttaggccaccacttcaagaactctgtagcaccgcctacatacctcgctctgctaatcctgttaccagtggctgctgccagtggcgataagtcgtgtcttaccgggttggactcaagacgatagttaccggataaggcgcagcggtcgggctgaacggggggttcgtgcacacagcccagcttggagcgaacgacctacaccgaactgagatacctacagcgtgagctatgagaaagcgccacgcttcccgaagggagaaaggcggacaggtatccggtaagcggcagggtcggaacaggagagcgcacgagggagcttccagggggaaacgcctggtatctttatagtcctgtcgggtttcgccacctctgacttgagcgtcgatttttgtgatgctcgtcaggggggcggagcctatggaaaaacgccagcaacgcggcctttttacggttcctggccttttgctggccttttgctcacatgttctttcctgcgttatcccctgattctgtggataaccgtattaccgcctttgagtgagctgataccgctcgccgcagccgaacgaccgagcgcagcgagtcagtgagcgaggaagcggaagagcgcccaatacgcaaaccgcctctccccgcgcgttggccgattcattaatgcagctggcacgacaggtttcccgactggaaagcgggcagtgagcgcaacgcaattaatgtgagttagctcactcattaggcaccccaggctttacactttatgcttccggctcgtatgttgtgtggaattgtgagcggataacaatttcacacaggaaacagctatgaccatgattacaccaagcttgcatgcaggcctatccgtagatgtacctggacatccaggtgatgccggcggcggtggtggaggcgcgcggaaagtcgcggacgcggttccagatgttgcgcagcggcaaaaagtgctccatggtcgggacgctctggccggtgaggcgtgcgcagtcgttgacgctctagaccgtgcaaaaggagagcctgtaagcgggcactcttccgtggtctggtggataaattcgcaagggtatcatggcggacgaccggggttcgaaccccggatccggccgtccgccgtgatccatgcggttaccgcccgcgtgtcgaacccaggtgtgcgacgtcagacaacgggggagcgctccttttggcttccttccaggcgcggcggctgctgcgctagcttttttggccactggccgcgcgcggcgtaagcggttaggctggaaagcgaaagcattaagtggctcgctccctgtagccggagggttattttccaagggttgagtcgcaggacccccggttcgagtctcgggccggccggactgcggcgaacgggggtttgcctccccgtcatgcaagaccccgcttgcaaattcctccggaaacagggacgagccccttttttgcttttcccagatgcatccggtgctgcggcagatgcgcccccctcctcagcagcggcaagagcaagagcagcggcagacatgcagggcaccctccccttctcctaccgcgtcaggaggggcaacatcgatccagacatgataagatacattgatgagtttggacaaaccacaactagaatgcagtgaaaaaaatgctttatttgtgaaatttgtgatgctattgctttatttgtaaccattataagctgcaataaacaagtttgtacagattaggttctacgaagaccaatcccgcccgcctaatgcggagcttaccgcctgcgtcattacccagggccacattcttggccaattgcaagccatcaacaaagcccgccaagagtttctgctacgaaagggacggggggtttacttggacccccagtccggcgaggagctcaacccaatccccccgccgccgcagccctatcagcagcagccgcgggcccttgcttcccaggatggcacccaaaaagaagctgcagctgccgccgccacccacggacgaggaggaatactgggacagtcaggcagaggaggttttggacgaggaggaggaggacatgatggaagactgggagagcctagacgaggaagcttccgaggtcgaagaggtgtcagacgaaacaccgtcaccctcggtcgcattcccctcgccggcgccccagaaatcggcaaccggttccagcatggctacaacctccgctcctcaggcgccgccggcactgcccgttcgccgacccaaccgtagatgggacaccactggaaccagggccggtaagtccaagcagccgccgccgttagcccaagagcaacaacagcgccaaggctaccgctcatggcgcgggcacaagaacgccatagttgcttgcttgcaagactgtgggggcaacatctccttcgcccgccgctttcttctctaccatcacggcgtggccttcccccgtaacatcctgcattactaccgtcatctctacagcccatactgcaccggcggcagcggcagcaacagcagcggccacacagaagcaaaggcgaccggatagcaagactctgacaaagcccaagaaatccacagcggcggcagcagcaggaggaggagcgctgcgtctggcgcccaacgaacccgtatcgacccgcgagcttagaaacaggatttttcccactctgtatgctatatttcaacagagcaggggccaagaacaagagctgaaaataaaaaacaggtctctgcgatccctcacccgcagctgcctgtatcacaaaagcgaagatcagcttcggcgcacgctggaagacgcggaggctctcttcagtaaatactgcgcgctgactcttaaggactagtttcgcgccctttctcaaatttaagcgcgaaaactacgtcatctccagcggccacacccggcgccagcacctgttgtcagcgccattatgagcaaggaaattcccacgccctacatgtggagttaccagccacaaatgggacttgcggctggagctgcccaagactactcaacccgaataaactacatgagcgcggggcggccgccgtttgtgttatgtttcaacgtgtttatttttcaattgcagaaaatttcaagtcatttttcattcagtagtatagccccaccaccacatagcttatacagatcaccgtaccttaatcaaactcacagaaccctagtattcaacctgccacctccctcccaacacacagagtacacagtcctttctccccggctggccttaaaaagcatcatatcatgggtaacagacatattcttaggtgttatattccacacggtttcctgtcgagccaaacgctcatcagtgatattaataaactccccgggcagctcacttaagttcatgtcgctgtccagctgctgagccacaggctgctgtccaacttgcggttgcttaacgggcggcgaaggagaagtccacgcctacatgggggtagagtcataatcgtgcatcaggatagggcggtggtgctgcagcagcgcgcgaataaactgctgccgccgccgctccgtcctgcaggaatacaacatggcagtggtctcctcagcgatgattcgcaccgcccgcagcataaggcgccttgtcctccgggcacagcagcgcaccctgatctcacttaaatcagcacagtaactgcagcacagcaccacaatattgttcaaaatcccacagtgcaaggcgctgtatccaaagctcatggcggggaccacagaacccacgtggccatcataccacaagcgcaggtagattaagtggcgacccctcataaacacgctggacataaacattacctcttttggcatgttgtaattcaccacctcccggtaccatataaacctctgattaaacatggcgccatccaccaccatcctaaaccagctggccaaaacctgcccgccggctatacactgcagggaaccgggactggaacaatgacagtggagagcccaggactcgtaaccatggatcatcatgctcgtcatgatatcaatgttggcacaacacaggcacacgtgcatacacttcctcaggattacaagctcctcccgcgttagaaccatatcccagggaacaacccattcctgaatcagcgtaaatcccacactgcagggaagacctcgcacgtaactcacgttgtgcattgtcaaagtgttacattcgggcagcagcggatgatcctccagtatggtagcgcgggtttctgtctcaaaaggaggtagacgatccctactgtacggagtgcgccgagacaaccgagatcgtgttggtcgtagtgtcatgccaaatggaacgccggacgtagtcatatttcctgaagcaaaaccaggtgcgggcgtgacaaacagatctgcgtctccggtctcgccgcttagatcgctctgtgtagtagttgtagtatatccactctctcaaagcatccaggcgccccctggcttcgggttctatgtaaactccttcatgcgccgctgccctgataacatccaccaccgcagaataagccacacccagccaacctacacattcgttctgcgagtcacacacgggaggagcgggaagagctggaagaaccatgtttttttttttattccaaaagattatccaaaacctcaaaatgaagatctattaagtgaacgcgctcccctccggtggcgtggtcaaactctacagccaaagaacagataatggcatttgtaagatgttgcacaatggcttccaaaaggcaaacggccctcacgtccaagtggacgtaaaggctaaacccttcagggtgaatctcctctataaacattccagcaccttcaaccatgcccaaataattctcatctcgccaccttctcaatatatctctaagcaaatcccgaatattaagtccggccattgtaaaaatctgctccagagcgccctccaccttcagcctcaagcagcgaatcatgattgcaaaaattcaggttcctcacagacctgtataagattcaaaagcggaacattaacaaaaataccgcgatcccgtaggtcccttcgcagggccagctgaacataatcgtgcaggtctgcacggaccagcgcggccacttccccgccaggaaccatgacaaaagaacccacactgattatgacacgcatactcggagctatgctaaccagcgtagccccgatgtaagcttgttgcatgggcggcgatataaaatgcaaggtgctgctcaaaaaatcaggcaaagcctcgcgcaaaaaagaaagcacatcgtagtcatgctcatgcagataaaggcaggtaagctccggaaccaccacagaaaaagacaccatttttctctcaaacatgtctgcgggtttctgcataaacacaaaataaaataacaaaaaaacatttaaacattagaagcctgtcttacaacaggaaaaacaacccttataagcataagacggactacggccatgccggcgtgaccgtaaaaaaactggtcaccgtgattaaaaagcaccaccgacagctcctcggtcatgtccggagtcataatgtaagactcggtaaacacatcaggttgattcacatcggtcagtgctaaaaagcgaccgaaatagcccgggggaatacatacccgcaggcgtagagacaacattacagcccccataggaggtataacaaaattaataggagagaaaaacacataaacacctgaaaaaccctcctgcctaggcaaaatagcaccctcccgctccagaacaacatacagcgcttccacagcggcagccataacagtcagccttaccagtaaaaaagaaaacctattaaaaaaacaccactcgacacggcaccagctcaatcagtcacagtgtaaaaaagggccaagtgcagagcgagtatatataggactaaaaaatgacgtaacggttaaagtccacaaaaaacacccagaaaaccgcacgcgaacctacgcccagaaacgaaagccaaaaaacccacaacttcctcaaatcgtcacttccgttttcccacgttacgtcacttcccattttaagaaaactacaattcccaacacatacaagttactccgcccttaattaaatcggatccgatatctagatgtattcgcgaggtaccgagctcgaattctctggccgtcgttttacaacgtcgtgactgggaaaaccctggcgttacccaacttaatcgccttgcagcacatccccctttcgccagctggcgtaatagcgaagaggcccgcaccgatcgcccttcccaacagttgcgcagcctgaatggcgaatggcgcctgatgcggtattttctccttacgcatctgtgcggtatttcacaccgcatatggtgcactctcagtacaatctgctctgatgccgcatagttaagccagccccgacacccgccaacacccgctgacgcgccctgacgggcttgtctgctcccggcatccgcttacagacaagctgtgaccgtctccgggagctgcatgtgtcagaggttttcaccgtcatcaccgaaacgcgcga

SEQ ID NO: 94 - DNA, 8707 bp, synthetic construct
  source 1..8707: mol_type = other DNA
tgcagctctggcccgtgtctcaaaatctctgatgttacattgcacaagataaaaatatatcatcatgaacaataaaactgtctgcttacataaacagtaatacaaggggtgttatgagccatattcaacgggaaacgtcgaggccgcgattaaattccaacatggatgctgatttatatgggtataaatgggctcgcgataatgtcgggcaatcaggtgcgacaatctatcgcttgtatgggaagcccgatgcgccagagttgtttctgaaacatggcaaaggtagcgttgccaatgatgttacagatgagatggtcagactaaactggctgacggaatttatgcctcttccgaccatcaagcattttatccgtactcctgatgatgcatggttactcaccactgcgatccccggaaaaacagcattccaggtattagaagaatatcctgattcaggtgaaaatattgttgatgcgctggcagtgttcctgcgccggttgcattcgattcctgtttgtaattgtccttttaacagcgatcgcgtatttcgtctcgctcaggcgcaatcacgaatgaataacggtttggttgatgcgagtgattttgatgacgagcgtaatggctggcctgttgaacaagtctggaaagaaatgcataaacttttgccattctcaccggattcagtcgtcactcatggtgatttctcacttgataaccttatttttgacgaggggaaattaataggttgtattgatgttggacgagtcggaatcgcagaccgataccaggatcttgccatcctatggaactgcctcggtgagttttctccttcattacagaaacggctttttcaaaaatatggtattgataatcctgatatgaataaattgcagtttcatttgatgctcgatgagtttttctaatcagaattggttaattggttgtaacattattcagattgggcttgatttaaaacttcatttttaatttaaaaggatctaggtgaagatcctttttgataatctcatgaccaaaatcccttaacgtgagttttcgttccactgagcgtcagaccccgtagaaaagatcaaaggatcttcttgagatcctttttttctgcgcgtaatctgctgcttgcaaacaaaaaaaccaccgctaccagcggtggtttgtttgccggatcaagagctaccaactctttttccgaaggtaactggcttcagcagagcgcagataccaaatactgttcttctagtgtagccgtagttaggccaccacttcaagaactctgtagcaccgcctacatacctcgctctgctaatcctgttaccagtggctgctgccagtggcgataagtcgtgtcttaccgggttggactcaagacgatagttaccggataaggcgcagcggtcgggctgaacggggggttcgtgcacacagcccagcttggagcgaacgacctacaccgaactgagatacctacagcgtgagctatgagaaagcgccacgcttcccgaagggagaaaggcggacaggtatccggtaagcggcagggtcggaacaggagagcgcacgagggagcttccagggggaaacgcctggtatctttatagtcctgtcgggtttcgccacctctgacttgagcgtcgatttttgtgatgctcgtcaggggggcggagcctatggaaaaacgccagcaacgcggcctttttacggttcctggccttttgctggccttttgctcacatgttctttcctgcgttatcccctgattctgtggataaccgtattaccgcctttgagtgagctgataccgctcgccgcagccgaacgaccgagcgcagcgagtcagtgagcgaggaagcggaagagcgcccaatacgcaaaccgcctctccccgcgcgttggccgattcattaatgcagctggcacgacaggtttcccgactggaaagcgggcagtgagcgcaacgcaattaatgtgagttagctcactcattaggcaccccaggctttacactttatgcttccggctcgtatgttgtgtggaattgtgagcggataacaatttcacacaggaaacagctatgaccatgattacaccaagcttgcatgcaggcctatccgtagatgtacctggacatccaggtgatgccggcggcggtggtggaggcgcgcggaaagtcgcggacgcggttccagatgttgcgcagcggcaaaaagtgctccatggtcgggacgctctggccggtgaggcgtgcgcagtcgttgacgctctagaccgtgcaaaaggagagcctgtaagcgggcactcttccgtggtctggtggataaattcgcaagggtatcatggcggacgaccggggttcgaaccccggatccggccgtccgccgtgatccatgcggttaccgcccgcgtgtcgaacccaggtgtgcgacgtcagacaacgggggagcgctccttttggcttccttccaggcgcggcggctgctgcgctagcttttttggccactggccgcgcgcggcgtaagcggttaggctggaaagcgaaagcattaagtggctcgctccctgtagccggagggttattttccaagggttgagtcgcaggacccccggttcgagtctcgggccggccggactgcggcgaacgggggtttgcctccccgtcatgcaagaccccgcttgcaaattcctccggaaacagggacgagccccttttttgcttttcccagatgcatccggtgctgcggcagatgcgcccccctcctcagcagcggcaagagcaagagcagcggcagacatgcagggcaccctccccttctcctaccgcgtcaggaggggcaacatcgatccagacatgataagatacattgatgagtttggacaaaccacaactagaatgcagtgaaaaaaatgctttatttgtgaaatttgtgatgctattgctttatttgtaaccattataagctgcaataaacaagtttgtacagattaggttctacgaagaccaatcccgcccgcctaatgcggagcttaccggctccggtgcccgtcagtgggcagagcgcacatcgcccacagtccccgagaagttggggggaggggtcggcaattgaaccggtgcctagagaaggtggcgcggggtaaactgggaaagtgatgtcgtgtactggctccgcctttttcccgagggtgggggagaaccgtatataagtgcagtagtcgccgtgaacgttctttttcgcaacgggtttgccgccagaacacaggtaagtgccgtgtgtggttcccgcgggcctggcctctttacgggttatggcccttgcgtgccttgaattacttccacgcccctggctgcagtacgtgattcttgatcccgagcttcgggttggaagtgggtgggagagttcgaggccttgcgcttaaggagccccttcgcctcgtgcttgagttgaggcctggcctgggcgctggggccgccgcgtgcgaatctggtggcaccttcgcgcctgtctcgctgctttcgataagtctctagccatttaaaatttttgatgacctgctgcgacgctttttttctggcaagatagtcttgtaaatgcgggccaagatctgcacactggtatttcggtttttggggccgcgggcggcgacggggcccgtgcgtcccagcgcacatgttcggcgaggcggggcctgcgagcgcggccaccgagaatcggacgggggtagtctcaagctggccggcctgctctggtgcctggcctcgcgccgccgtgtatcgccccgccctgggcggcaaggctggcccggtcggcaccagttgcgtgagcggaaagatggccgcttcccggccctgctgcagggagctcaaaatggaggacgcggcgctcgggagagcgggcgggtgagtcacccacacaaaggaaaagggcctttccgtcctcagccgtcgcttcatgtgactccacggagtaccgggcgccgtccaggcacctcgattagttctcgagcttttggagtacgtcgtctttaggttggggggaggggttttatgcgatggagtttccccacactgagtgggtggagactgaagttaggccagcttggcacttgatgtaattctccttggaatttgccctttttgagtttggatcttggttcattctcaagcctcagacagtggttcaaagtttttttcttccatttcaggtgtcgtgaccgccgcagccctatcagcagcagccgcgggcccttgcttcccagggccaccatggcacccaaaaagaagctgcagctgccgccgccacccacggacgaggaggaatactgggacagtcaggcagaggaggttttggacgaggaggaggaggacatgatggaagactgggagagcctagacgaggaagcttccgaggtcgaagaggtgtcagacgaaacaccgtcaccctcggtcgcattcccctcgccggcgccccagaaatcggcaaccggttccagcatggctacaacctccgctcctcaggcgccgccggcactgcccgttcgccgacccaaccgtagatgggacaccactggaaccagggccggtaagtccaagcagccgccgccgttagcccaagagcaacaacagcgccaaggctaccgctcatggcgcgggcacaagaacgccatagttgcttgcttgcaagactgtgggggcaacatctccttcgcccgccgctttcttctctaccatcacggcgtggccttcccccgtaacatcctgcattactaccgtcatctctacagcccatactgcaccggcggcagcggcagcaacagcagcggccacacagaagcaaaggcgaccggatagcaagactctgacaaagcccaagaaatccacagcggcggcagcagcaggaggaggagcgctgcgtctggcgcccaacgaacccgtatcgacccgcgagcttagaaacaggatttttcccactctgtatgctatatttcaacagagcaggggccaagaacaagagctgaaaataaaaaacaggtctctgcgatccctcacccgcagctgcctgtatcacaaaagcgaagatcagcttcggcgcacgctggaagacgcggaggctctcttcagtaaatactgcgcgctgactcttaaggactagaataaaagatctttattttcattagatctgtgtgttggttttttgtgtggcggccgccgtttgtgttatgtttcaacgtgtttatttttcaattgcagaaaatttcaagtcatttttcattcagtagtatagccccaccaccacatagcttatacagatcaccgtaccttaatcaaactcacagaaccctagtattcaacctgccacctccctcccaacacacagagtacacagtcctttctccccggctggccttaaaaagcatcatatcatgggtaacagacatattcttaggtgttatattccacacggtttcctgtcgagccaaacgctcatcagtgatattaataaactccccgggcagctcacttaagttcatgtcgctgtccagctgctgagccacaggctgctgtccaacttgcggttgcttaacgggcggcgaaggagaagtccacgcctacatgggggtagagtcataatcgtgcatcaggatagggcggtggtgctgcagcagcgcgcgaataaactgctgccgccgccgctccgtcctgcaggaatacaacatggcagtggtctcctcagcgatgattcgcaccgcccgcagcataaggcgccttgtcctccgggcacagcagcgcaccctgatctcacttaaatcagcacagtaactgcagcacagcaccacaatattgttcaaaatcccacagtgcaaggcgctgtatccaaagctcatggcggggaccacagaacccacgtggccatcataccacaagcgcaggtagattaagtggcgacccctcataaacacgctggacataaacattacctcttttggcatgttgtaattcaccacctcccggtaccatataaacctctgattaaacatggcgccatccaccaccatcctaaaccagctggccaaaacctgcccgccggctatacactgcagggaaccgggactggaacaatgacagtggagagcccaggactcgtaaccatggatcatcatgctcgtcatgatatcaatgttggcacaacacaggcacacgtgcatacacttcctcaggattacaagctcctcccgcgttagaaccatatcccagggaacaacccattcctgaatcagcgtaaatcccacactgcagggaagacctcgcacgtaactcacgttgtgcattgtcaaagtgttacattcgggcagcagcggatgatcctccagtatggtagcgcgggtttctgtctcaaaaggaggtagacgatccctactgtacggagtgcgccgagacaaccgagatcgtgttggtcgtagtgtcatgccaaatggaacgccggacgtagtcatatttcctgaagcaaaaccaggtgcgggcgtgacaaacagatctgcgtctccggtctcgccgcttagatcgctctgtgtagtagttgtagtatatccactctctcaaagcatccaggcgccccctggcttcgggttctatgtaaactccttcatgcgccgctgccctgataacatccaccaccgcagaataagccacacccagccaacctacacattcgttctgcgagtcacacacgggaggagcgggaagagctggaagaaccatgtttttttttttattccaaaagattatccaaaacctcaaaatgaagatctattaagtgaacgcgctcccctccggtggcgtggtcaaactctacagccaaagaacagataatggcatttgtaagatgttgcacaatggcttccaaaaggcaaacggccctcacgtccaagtggacgtaaaggctaaacccttcagggtgaatctcctctataaacattccagcaccttcaaccatgcccaaataattctcatctcgccaccttctcaatatatctctaagcaaatcccgaatattaagtccggccattgtaaaaatctgctccagagcgccctccaccttcagcctcaagcagcgaatcatgattgcaaaaattcaggttcctcacagacctgtataagattcaaaagcggaacattaacaaaaataccgcgatcccgtaggtcccttcgcagggccagctgaacataatcgtgcaggtctgcacggaccagcgcggccacttccccgccaggaaccatgacaaaagaacccacactgattatgacacgcatactcggagctatgctaaccagcgtagccccgatgtaagcttgttgcatgggcggcgatataaaatgcaaggtgctgctcaaaaaatcaggcaaagcctcgcgcaaaaaagaaagcacatcgtagtcatgctcatgcagataaaggcaggtaagctccggaaccaccacagaaaaagacaccatttttctctcaaacatgtctgcgggtttctgcataaacacaaaataaaataacaaaaaaacatttaaacattagaagcctgtcttacaacaggaaaaacaacccttataagcataagacggactacggccatgccggcgtgaccgtaaaaaaactggtcaccgtgattaaaaagcaccaccgacagctcctcggtcatgtccggagtcataatgtaagactcggtaaacacatcaggttgattcacatcggtcagtgctaaaaagcgaccgaaatagcccgggggaatacatacccgcaggcgtagagacaacattacagcccccataggaggtataacaaaattaataggagagaaaaacacataaacacctgaaaaaccctcctgcctaggcaaaatagcaccctcccgctccagaacaacatacagcgcttccacagcggcagccataacagtcagccttaccagtaaaaaagaaaacctattaaaaaaacaccactcgacacggcaccagctcaatcagtcacagtgtaaaaaagggccaagtgcagagcgagtatatataggactaaaaaatgacgtaacggttaaagtccacaaaaaacacccagaaaaccgcacgcgaacctacgcccagaaacgaaagccaaaaaacccacaacttcctcaaatcgtcacttccgttttcccacgttacgtcacttcccattttaagaaaactacaattcccaacacatacaagttactccgcccttaattaaatcggatccgatatctagatgtattcgcgaggtaccgagctcgaattctctggccgtcgttttacaacgtcgtgactgggaaaaccctggcgttacccaacttaatcgccttgcagcacatccccctttcgccagctggcgtaatagcgaagaggcccgcaccgatcgcccttcccaacagttgcgcagcctgaatggcgaatggcgcctgatgcggtattttctccttacgcatctgtgcggtatttcacaccgcatatggtgcactctcagtacaatctgctctgatgccgcatagttaagccagccccgacacccgccaacacccgctgacgcgccctgacgggcttgtctgctcccggcatccgcttacagacaagctgtgaccgtctccgggagctgcatgtgtcagaggttttcaccgtcatcaccgaaacgcgcga

SEQ ID NO: 95 - DNA, 2174 bp, synthetic construct
  source 1..2174: mol_type = other DNA
acattaattaaggatccgaattcagtactcatatgttgacaattaatcatcggcatagtatatcggcatagtataatacgactcactataggagggccaccaaggtgaggaactaaaccatgagccatattcaacgggaaacgtcgaggccgcgattaaattccaacatggatgctgatttatatgggtataaatgggctcgcgataatgtcgggcaatcaggtgcgacaatctatcgcttgtatgggaagcccgatgcgccagagttgtttctgaaacatggcaaaggtagcgttgccaatgatgttacagatgagatggtcagactaaactggctgacggaatttatgccacttccgaccatcaagcattttatccgtactcctgatgatgcatggttactcaccactgcgatccccggaaaaacagcgttccaggtattagaagaatatcctgattcaggtgaaaatattgttgatgcgctggcagtgttcctgcgccggttgcactcgattcctgtttgtaattgtccttttaacagcgatcgcgtatttcgcctcgctcaggcgcaatcacgaatgaataacggtttggttgatgcgagtgattttgatgacgagcgtaatggctggcctgttgaacaagtctggaaagaaatgcataaacttttgccattctcaccggattcagtcgtcactcatggtgatttctcacttgataaccttatttttgacgaggggaaattaataggttgtattgatgttggacgagtcggaatcgcagaccgataccaggatcttgccatcctatggaactgcctcggtgagttttctccttcattacagaaacggctttttcaaaaatatggtattgataatcctgatatgaataaattgcagtttcatttgatgctcgatgagtttttctaataaaaacccgcttcggcgggtttttttatgcatgtgagcaaaaggccagcaaaaggccaggaaccgtaaaaaggccgcgttgctggcgtttttccataggctccgcccccctgacgagcatcacaaaaatcgacgctcaagtcagaggtggcgaaacccgacaggactataaagataccaggcgtttccccctggaagctccctcgtgcgctctcctgttccgaccctgccgcttaccggatacctgtccgcctttctcccttcgggaagcgtggcgctttctcatagctcacgctgtaggtatctcagttcggtgtaggtcgttcgctccaagctgggctgtgtgcacgaaccccccgttcagcccgaccgctgcgccttatccggtaactatcgtcttgagtccaacccggtaagacacgacttatcgccactggcagcagccactggtaacaggattagcagagcgaggtatgtaggcggtgctacagagttcttgaagtggtggcctaactacggctacactagaagaacagtatttggtatctgcgctctgctgaagccagttaccttcggaaaaagagttggtagctcttgatccggcaaacaaaccaccgctggtagcggtggtttttttgtttgcaagcagcagattacgcgcagaaaaaaaggatctcaagaagatcctttgatcttttctacggggtctgacgctcagtggaacgaaaactcacgttaagggattttggtcatgtcgacgttaacaagctttacgtacagtaactatgcggcatcagagcagattgtactgagagtgcaccatatgcggtgtgaaataccgcacagatgcgtaaggagaaaataccgcatcaggcgccattcgccattcaggctgcgcaactgttgggaagggcgatcggtgcgggcctcttcgctattacgccagctggcgaaagggggatgtgctgcaaggcgattaagttgggtaacgccagggttttcccagtcacgacgttgtaaaacgacggccagagaattcgagctcggtacctcgcgaatacatctagatatcggatcccgggcccgtcgactgcagaggcctgcatgcaagcttggtgtaatcatggtcatagctgtttcctgtgtgaaattgttatccgctcacaattccacacaacatacgagccggaagcataaagtgtaaagcctggggtgcctaatgagtgagctaactcacattaattg

SEQ ID NO: 96-99 - skipped (4 entries)

SEQ ID NO: 100 - DNA, 8977 bp, synthetic construct
  source 1..8977: mol_type = other DNA
tgcagctctggcccgtgtctcaaaatctctgatgttacattgcacaagataaaaatatatcatcatgaacaataaaactgtctgcttacataaacagtaatacaaggggtgttatgagccatattcaacgggaaacgtcgaggccgcgattaaattccaacatggatgctgatttatatgggtataaatgggctcgcgataatgtcgggcaatcaggtgcgacaatctatcgcttgtatgggaagcccgatgcgccagagttgtttctgaaacatggcaaaggtagcgttgccaatgatgttacagatgagatggtcagactaaactggctgacggaatttatgcctcttccgaccatcaagcattttatccgtactcctgatgatgcatggttactcaccactgcgatccccggaaaaacagcattccaggtattagaagaatatcctgattcaggtgaaaatattgttgatgcgctggcagtgttcctgcgccggttgcattcgattcctgtttgtaattgtccttttaacagcgatcgcgtatttcgtctcgctcaggcgcaatcacgaatgaataacggtttggttgatgcgagtgattttgatgacgagcgtaatggctggcctgttgaacaagtctggaaagaaatgcataaacttttgccattctcaccggattcagtcgtcactcatggtgatttctcacttgataaccttatttttgacgaggggaaattaataggttgtattgatgttggacgagtcggaatcgcagaccgataccaggatcttgccatcctatggaactgcctcggtgagttttctccttcattacagaaacggctttttcaaaaatatggtattgataatcctgatatgaataaattgcagtttcatttgatgctcgatgagtttttctaatcagaattggttaattggttgtaacattattcagattgggcttgatttaaaacttcatttttaatttaaaaggatctaggtgaagatcctttttgataatctcatgaccaaaatcccttaacgtgagttttcgttccactgagcgtcagaccccgtagaaaagatcaaaggatcttcttgagatcctttttttctgcgcgtaatctgctgcttgcaaacaaaaaaaccaccgctaccagcggtggtttgtttgccggatcaagagctaccaactctttttccgaaggtaactggcttcagcagagcgcagataccaaatactgttcttctagtgtagccgtagttaggccaccacttcaagaactctgtagcaccgcctacatacctcgctctgctaatcctgttaccagtggctgctgccagtggcgataagtcgtgtcttaccgggttggactcaagacgatagttaccggataaggcgcagcggtcgggctgaacggggggttcgtgcacacagcccagcttggagcgaacgacctacaccgaactgagatacctacagcgtgagctatgagaaagcgccacgcttcccgaagggagaaaggcggacaggtatccggtaagcggcagggtcggaacaggagagcgcacgagggagcttccagggggaaacgcctggtatctttatagtcctgtcgggtttcgccacctctgacttgagcgtcgatttttgtgatgctcgtcaggggggcggagcctatggaaaaacgccagcaacgcggcctttttacggttcctggccttttgctggccttttgctcacatgttctttcctgcgttatcccctgattctgtggataaccgtattaccgcctttgagtgagctgataccgctcgccgcagccgaacgaccgagcgcagcgagtcagtgagcgaggaagcggaagagcgcccaatacgcaaaccgcctctccccgcgcgttggccgattcattaatgcagctggcacgacaggtttcccgactggaaagcgggcagtgagcgcaacgcaattaatgtgagttagctcactcattaggcaccccaggctttacactttatgcttccggctcgtatgttgtgtggaattgtgagcggataacaatttcacacaggaaacagctatgaccatgattacaccaagcttgcatgcaggcctctgcagtcgaccagaagcaccatgtccttgggtccggcctgctgaatgcgcaggcggtcggccatgccccaggcttcgttttgacatcggcgcaggtctttgtagtagtcttgcatgagcctttctaccggcacttcttcttctccttcctcttgtcctgcatctcttgcatctatcgctgcggcggcggcggagtttggccgtaggtggcgccctcttcctcccatgcgtgtgaccccgaagcccctcatcggctgaagcagggctaggtcggcgacaacgcgctcggctaatatggcctgctgcacctgcgtgagggtagactggaagtcatccatgtccacaaagcggtggtatgcgcccgtgttgatggtgtaagtgcagttggccataacggaccagttaacggtctggtgacccggctgcgagagctcggtgtacctgagacgcgagtaagccctcgagtcaaatacgtagtcgttgcaagtccgcaccaggtactggtatcccaccaaaaagtgcggcggcggctggcggtagaggggccagcgtagggtggccggggctccgggggcgagatcttccaacataaggcgatgatatccgtagatgtacctggacatccaggtgatgccggcggcggtggtggaggcgcgcggaaagtcgcggacgcggttccagatgttgcgcagcggcaaaaagtgctccatggtcgggacgctctggccggtcaggcgcgcgcaatcgttgacgctctagcgtgcaaaaggagagcctgtaagcgggcactcttccgtggtctggtggataaattcgcaagggtatcatggcggacgaccggggttcgagccccgtatccggccgtccgccgtgatccatgcggttaccgcccgcgtgtcgaacccaggtgtgcgacgtcagacaacgggggagtgctccttttggcttccttccaggcgcggcggctgctgcgctagcttttttggccactggccgcgcgcagcgtaagcggttaggctggaaagcgaaagcattaagtggctcgctccctgtagccggagggttattttccaagggttgagtcgcgggacccccggttcgagtctcggaccgagactgggggcgtacactggatggcctttgcctggaacccgcactcaaaaacatgctacctctttgagccctttggcttttctgaccagcgactcaagcaggtttaccagtttgagtacgagtcactcctgcgccgtagcgccattgcttcttcccccgaccgctgtataacgctggaaaagtccacccaaagcgtacaggggcccaactcggccgcctgtggactattctgctgcatgtttctccacgcctttgccaactggccccaaactcccatggatcacaaccccaccatgaaccttattaccggggtacccaactccatgctcaacagtccccaggtacagcccaccctgcgtcgcaaccaggaacagctctacagcttcctggagcgccactcgccctacttccgcagccacagtgcgcagattaggagcgccacttctttttgtcacttgaaaaacatgtaaaaataatgtactagagacactttcaataaaggcaaatgcttttatttgtacactctcgggtgattatttacccccacccttgccgtctgcgccgtttaaaaatcaaaggggttctgccgcgcatcgctatgcgccactggcagggacacgttgcgatactggtgtttagtgctccacttaaactcaggcacaaccatccgcggcagctcggtgaagttttcactccacaggctgcgcaccatcaccaacgcgtttagcaggtcgggcgccgatatcttgaagtcgcagttggggcctccgccctgcgcgcgcgagttgcgatacacagggttgcagcactggaacactatcagcgccgggtggtgcacgctggccagcacgctcttgtcggagatcagatccgcgtccaggtcctccgcgttgctcagggcgaacggagtcaactttggtagctgccttcccaaaaagggcgcgtgcccaggctttgagttgcactcgcaccgtagtggcatcaaaaggtgaccgtgcccggtctgggcgttaggatacagcgcctgcataaaagccttgatctgcttaaaagccacctgagcctttgcgccttcagagaagaacatgccgcaagacttgccggaaaactgattggccggacaggccgcgtcgtgcacgcagcaccttgcgtcggtgttggagatctgcaccacatttcggccccaccggttcttcacgatcttggccttgctagactgctccttcagcgcgcgctgcccgttttcgctcgtcacatccatttcaatcacgtgctccttatttatcataatgcttccgtgtagacacttaagctcgccttcgatctcagcgcagcggtgcagccacaacgcgcagcccgtgggctcgtgatgcttgtaggtcacctctgcaaacgactgcaggtacgcctgcaggaatcgccccatcatcgtcacaaaggtcttgttgctggtgaaggtcagctgcaacccgcggtgctcctcgttcagccaggtcttgcatacggccgccagagcttccacttggtcaggcagtagtttgaagttcgcctttagatcgttatccacgtggtacttgtccatcagcgcgcgcgcagcctccatgcccttctcccacgcagacacgatcggcacactcagcgggttcatcaccgtaatttcactttccgcttcgctgggctcttcctcttcctcttgcgtccgcataccacgcgccactgggtcgtcttcattcagccgccgcactgtgcgcttacctcctttgccatgcttgattagcaccggtgggttgctgaaacccaccatttgtagcgccacatcttctctttcttcctcgctgtccacgattacctctggtgatggcgggcgctcgggcttgggagaagggcgcttctttttcttcttgggcgcaatggccaaatccgccgccgaggtcgatggccgcgggctgggtgtgcgcggcaccagcgcgtcttgtgatgagtcttcctcgtcctcggactcgatacgccgcctcatccgcttttttgggggcgcccggggaggcggcggcgacggggacggggacgacacgtcctccatggttgggggacgtcgcgccgcaccgcgtccgcgctcgggggtggtttcgcgctgctcctcttcccgactggccatttccttctcctataggcagaaaaagatccacaaaagcgaagatcagcttcggcgcacgctggaagacgcggaggctctcttcagtaaatactgcgcgctgactcttaaggactagtttcgcgccctttctcaaatttaagcgcgaaaactacgtcatctccagcggccacacccggcgccagcacctgttgtcagcgccattggcgcgccggccggccgaatatcttcatttaaatgtttaaacatcgatgcggccgcgattaggttctacgaagaccaatcccgcccgcctaatgcggagcttaccgcctgcgtcattacccagggccacattcttggccaattgcaagccatcaacaaagcccgccaagagtttctgctacgaaagggacggggggtttacttggacccccagtccggcgaggagctcaacccaatccccccgccgccgcagccctatcagcagcagccgcgggcccttgcttcccaggatggcacccaaaaagaagctgcagctgccgccgccacccacggacgaggaggaatactgggacagtcaggcagaggaggttttggacgaggaggaggaggacatgatggaagactgggagagcctagacgaggaagcttccgaggtcgaagaggtgtcagacgaaacaccgtcaccctcggtcgcattcccctcgccggcgccccagaaatcggcaaccggttccagcatggctacaacctccgctcctcaggcgccgccggcactgcccgttcgccgacccaaccgtagatgggacaccactggaaccagggccggtaagtccaagcagccgccgccgttagcccaagagcaacaacagcgccaaggctaccgctcatggcgcgggcacaagaacgccatagttgcttgcttgcaagactgtgggggcaacatctccttcgcccgccgctttcttctctaccatcacggcgtggccttcccccgtaacatcctgcattactaccgtcatctctacagcccatactgcaccggcggcagcggcagcaacagcagcggccacacagaagcaaaggcgaccggatagcaagactctgacaaagcccaagaaatccacagcggcggcagcagcaggaggaggagcgctgcgtctggcgcccaacgaacccgtatcgacccgcgagcttagaaacaggatttttcccactctgtatgctatatttcaacagagcaggggccaagaacaagagctgaaaataaaaaacaggtctctgcgatccctcacccgcagctgcctgtatcacaaaagcgaagatcagcttcggcgcacgctggaagacgcggaggctctcttcagtaaatactgcgcgctgactcttaaggactagaataaaagatctttattttcattagatctgtgtgttggttttttgtgtggcggccgcaacttgtttattgcagcttataatggttacaaataaagcaatagcatcacaaatttcacaaataaagcatttttttcactgcattctagttgtggtttgtccaaactcatcaatgtatcttagcttaacgggcggcgaaggagaagtccacgcctacatgggggtagagtcataatcgtgcatcaggatagggcggtggtgctgcagcagcgcgcgaataaactgctgccgccgccgctccgtcctgcaggaatacaacatggcagtggtctcctcagcgatgattcgcaccgcccgcagcataaggcgccttgtcctccgggcacagcagcgcaccctgatctcacttaaatcagcacagtaactgcagcacagcaccacaatattgttcaaaatcccacagtgcaaggcgctgtatccaaagctcatggcggggaccacagaacccacgtggccatcataccacaagcgcaggtagattaagtggcgacccctcataaacacgctggacataaacattacctcttttggcatgttgtaattcaccacctcccggtaccatataaacctctgattaaacatggcgccatccaccaccatcctaaaccagctggccaaaacctgcccgccggctatacactgcagggaaccgggactggaacaatgacagtggagagcccaggactcgtaaccatggatcatcatgctcgtcatgatatcaatgttggcacaacacaggcacacgtgcatacacttcctcaggattacaagctcctcccgcgttagaaccatatcccagggaacaacccattcctgaatcagcgtaaatcccacactgcagggaagacctcgcacgtaactcacgttgtgcattgtcaaagtgttacattcgggcagcagcggatgatcctccagtatggtagcgcgggtttctgtctcaaaaggaggtagacgatccctactgtacggagtgcgccgagacaaccgagatcgtgttggtcgtagtgtcatgccaaatggaacgccggacgtagtcatatttcctgaagcaaaaccaggtgcgggcgtgacaaacagatctgcgtctccggtctcgccgcttagatcgctctgtgtagtagttgtagtatatccactctctcaaagcatccaggcgccccctggcttcgggttctatgtaaactccttcatgcgccgctgccctgataacatccaccaccgcagaataagccacacccagccaacctacacattcgttctgcgagtcacacacgggaggagcgggaagagctggaagaaccatggtggcatttgcaaaagcctaggcctccaaaaaagcctcctcactacttctggaatagctcagaggccgaggcggcctcggcctctgcataaataaaaaaaattagtcagccatggggcggagaatgggcggaactgggcggagttaggggcgggatgggcggagttaggggcgggactatggttgctgactaattgagatgcatgctttgcatacttctgcctgctggggagcctggggactttccacacctggttgctgactaattgagatgcatgctttgcatacttctgcctgctggggagcctggggactttccacaccctaactgacacacacgttacgtcacttcccattttaagaaaactacaattcccaacacatacaagttactccgcccttaattaaatcggatccgatatctagatgtattcgcgaggtaccgagctcgaattctctggccgtcgttttacaacgtcgtgactgggaaaaccctggcgttacccaacttaatcgccttgcagcacatccccctttcgccagctggcgtaatagcgaagaggcccgcaccgatcgcccttcccaacagttgcgcagcctgaatggcgaatggcgcctgatgcggtattttctccttacgcatctgtgcggtatttcacaccgcatatggtgcactctcagtacaatctgctctgatgccgcatagttaagccagccccgacacccgccaacacccgctgacgcgccctgacgggcttgtctgctcccggcatccgcttacagacaagctgtgaccgtctccgggagctgcatgtgtcagaggttttcaccgtcatcaccgaaacgcgcga

SEQ ID NO: 101 - DNA, 8144 bp, synthetic construct
  source 1..8144: mol_type = other DNA
aattcagtactcatatgttgacaattaatcatcggcatagtatatcggcatagtataatacgactcactataggagggccaccaaggtgaggaactaaaccatgagccatattcaacgggaaacgtcgaggccgcgattaaattccaacatggatgctgatttatatgggtataaatgggctcgcgataatgtcgggcaatcaggtgcgacaatctatcgcttgtatgggaagcccgatgcgccagagttgtttctgaaacatggcaaaggtagcgttgccaatgatgttacagatgagatggtcagactaaactggctgacggaatttatgccacttccgaccatcaagcattttatccgtactcctgatgatgcatggttactcaccactgcgatccccggaaaaacagcgttccaggtattagaagaatatcctgattcaggtgaaaatattgttgatgcgctggcagtgttcctgcgccggttgcactcgattcctgtttgtaattgtccttttaacagcgatcgcgtatttcgcctcgctcaggcgcaatcacgaatgaataacggtttggttgatgcgagtgattttgatgacgagcgtaatggctggcctgttgaacaagtctggaaagaaatgcataaacttttgccattctcaccggattcagtcgtcactcatggtgatttctcacttgataaccttatttttgacgaggggaaattaataggttgtattgatgttggacgagtcggaatcgcagaccgataccaggatcttgccatcctatggaactgcctcggtgagttttctccttcattacagaaacggctttttcaaaaatatggtattgataatcctgatatgaataaattgcagtttcatttgatgctcgatgagtttttctaataaaaacccgcttcggcgggtttttttatgcatgtgagcaaaaggccagcaaaaggccaggaaccgtaaaaaggccgcgttgctggcgtttttccataggctccgcccccctgacgagcatcacaaaaatcgacgctcaagtcagaggtggcgaaacccgacaggactataaagataccaggcgtttccccctggaagctccctcgtgcgctctcctgttccgaccctgccgcttaccggatacctgtccgcctttctcccttcgggaagcgtggcgctttctcatagctcacgctgtaggtatctcagttcggtgtaggtcgttcgctccaagctgggctgtgtgcacgaaccccccgttcagcccgaccgctgcgccttatccggtaactatcgtcttgagtccaacccggtaagacacgacttatcgccactggcagcagccactggtaacaggattagcagagcgaggtatgtaggcggtgctacagagttcttgaagtggtggcctaactacggctacactagaagaacagtatttggtatctgcgctctgctgaagccagttaccttcggaaaaagagttggtagctcttgatccggcaaacaaaccaccgctggtagcggtggtttttttgtttgcaagcagcagattacgcgcagaaaaaaaggatctcaagaagatcctttgatcttttctacggggtctgacgctcagtggaacgaaaactcacgttaagggattttggtcatgtcgacgttaacaagctttaccctctgcagtcgaccagaagcaccatgtccttgggtccggcctgctgaatgcgcaggcggtcggccatgccccaggcttcgttttgacatcggcgcaggtctttgtagtagtcttgcatgagcctttctaccggcacttcttcttctccttcctcttgtcctgcatctcttgcatctatcgctgcggcggcggcggagtttggccgtaggtggcgccctcttcctcccatgcgtgtgaccccgaagcccctcatcggctgaagcagggctaggtcggcgacaacgcgctcggctaatatggcctgctgcacctgcgtgagggtagactggaagtcatccatgtccacaaagcggtggtatgcgcccgtgttgatggtgtaagtgcagttggccataacggaccagttaacggtctggtgacccggctgcgagagctcggtgtacctgagacgcgagtaagccctcgagtcaaatacgtagtcgttgcaagtccgcaccaggtactggtatcccaccaaaaagtgcggcggcggctggcggtagaggggccagcgtagggtggccggggctccgggggcgagatcttccaacataaggcgatgatatccgtagatgtacctggacatccaggtgatgccggcggcggtggtggaggcgcgcggaaagtcgcggacgcggttccagatgttgcgcagcggcaaaaagtgctccatggtcgggacgctctggccggtcaggcgcgcgcaatcgttgacgctctagcgtgcaaaaggagagcctgtaagcgggcactcttccgtggtctggtggataaattcgcaagggtatcatggcggacgaccggggttcgagccccgtatccggccgtccgccgtgatccatgcggttaccgcccgcgtgtcgaacccaggtgtgcgacgtcagacaacgggggagtgctccttttggcttccttccaggcgcggcggctgctgcgctagcttttttggccactggccgcgcgcagcgtaagcggttaggctggaaagcgaaagcattaagtggctcgctccctgtagccggagggttattttccaagggttgagtcgcgggacccccggttcgagtctcggaccgagactgggggcgtacactggatggcctttgcctggaacccgcactcaaaaacatgctacctctttgagccctttggcttttctgaccagcgactcaagcaggtttaccagtttgagtacgagtcactcctgcgccgtagcgccattgcttcttcccccgaccgctgtataacgctggaaaagtccacccaaagcgtacaggggcccaactcggccgcctgtggactattctgctgcatgtttctccacgcctttgccaactggccccaaactcccatggatcacaaccccaccatgaaccttattaccggggtacccaactccatgctcaacagtccccaggtacagcccaccctgcgtcgcaaccaggaacagctctacagcttcctggagcgccactcgccctacttccgcagccacagtgcgcagattaggagcgccacttctttttgtcacttgaaaaacatgtaaaaataatgtactagagacactttcaataaaggcaaatgcttttatttgtacactctcgggtgattatttacccccacccttgccgtctgcgccgtttaaaaatcaaaggggttctgccgcgcatcgctatgcgccactggcagggacacgttgcgatactggtgtttagtgctccacttaaactcaggcacaaccatccgcggcagctcggtgaagttttcactccacaggctgcgcaccatcaccaacgcgtttagcaggtcgggcgccgatatcttgaagtcgcagttggggcctccgccctgcgcgcgcgagttgcgatacacagggttgcagcactggaacactatcagcgccgggtggtgcacgctggccagcacgctcttgtcggagatcagatccgcgtccaggtcctccgcgttgctcagggcgaacggagtcaactttggtagctgccttcccaaaaagggcgcgtgcccaggctttgagttgcactcgcaccgtagtggcatcaaaaggtgaccgtgcccggtctgggcgttaggatacagcgcctgcataaaagccttgatctgcttaaaagccacctgagcctttgcgccttcagagaagaacatgccgcaagacttgccggaaaactgattggccggacaggccgcgtcgtgcacgcagcaccttgcgtcggtgttggagatctgcaccacatttcggccccaccggttcttcacgatcttggccttgctagactgctccttcagcgcgcgctgcccgttttcgctcgtcacatccatttcaatcacgtgctccttatttatcataatgcttccgtgtagacacttaagctcgccttcgatctcagcgcagcggtgcagccacaacgcgcagcccgtgggctcgtgatgcttgtaggtcacctctgcaaacgactgcaggtacgcctgcaggaatcgccccatcatcgtcacaaaggtcttgttgctggtgaaggtcagctgcaacccgcggtgctcctcgttcagccaggtcttgcatacggccgccagagcttccacttggtcaggcagtagtttgaagttcgcctttagatcgttatccacgtggtacttgtccatcagcgcgcgcgcagcctccatgcccttctcccacgcagacacgatcggcacactcagcgggttcatcaccgtaatttcactttccgcttcgctgggctcttcctcttcctcttgcgtccgcataccacgcgccactgggtcgtcttcattcagccgccgcactgtgcgcttacctcctttgccatgcttgattagcaccggtgggttgctgaaacccaccatttgtagcgccacatcttctctttcttcctcgctgtccacgattacctctggtgatggcgggcgctcgggcttgggagaagggcgcttctttttcttcttgggcgcaatggccaaatccgccgccgaggtcgatggccgcgggctgggtgtgcgcggcaccagcgcgtcttgtgatgagtcttcctcgtcctcggactcgatacgccgcctcatccgcttttttgggggcgcccggggaggcggcggcgacggggacggggacgacacgtcctccatggttgggggacgtcgcgccgcaccgcgtccgcgctcgggggtggtttcgcgctgctcctcttcccgactggccatttccttctcctataggcagaaaaagatccacaaaagcgaagatcagcttcggcgcacgctggaagacgcggaggctctcttcagtaaatactgcgcgctgactcttaaggactagtttcgcgccctttctcaaatttaagcgcgaaaactacgtcatctccagcggccacacccggcgccagcacctgttgtcagcgccattggcgcgccggccggccgaatatcttcatttaaatgtttaaacatcgatgcggccgcgattaggttctacgaagaccaatcccgcccgcctaatgcggagcttaccgcctgcgtcattacccagggccacattcttggccaattgcaagccatcaacaaagcccgccaagagtttctgctacgaaagggacggggggtttacttggacccccagtccggcgaggagctcaacccaatccccccgccgccgcagccctatcagcagcagccgcgggcccttgcttcccaggatggcacccaaaaagaagctgcagctgccgccgccacccacggacgaggaggaatactgggacagtcaggcagaggaggttttggacgaggaggaggaggacatgatggaagactgggagagcctagacgaggaagcttccgaggtcgaagaggtgtcagacgaaacaccgtcaccctcggtcgcattcccctcgccggcgccccagaaatcggcaaccggttccagcatggctacaacctccgctcctcaggcgccgccggcactgcccgttcgccgacccaaccgtagatgggacaccactggaaccagggccggtaagtccaagcagccgccgccgttagcccaagagcaacaacagcgccaaggctaccgctcatggcgcgggcacaagaacgccatagttgcttgcttgcaagactgtgggggcaacatctccttcgcccgccgctttcttctctaccatcacggcgtggccttcccccgtaacatcctgcattactaccgtcatctctacagcccatactgcaccggcggcagcggcagcaacagcagcggccacacagaagcaaaggcgaccggatagcaagactctgacaaagcccaagaaatccacagcggcggcagcagcaggaggaggagcgctgcgtctggcgcccaacgaacccgtatcgacccgcgagcttagaaacaggatttttcccactctgtatgctatatttcaacagagcaggggccaagaacaagagctgaaaataaaaaacaggtctctgcgatccctcacccgcagctgcctgtatcacaaaagcgaagatcagcttcggcgcacgctggaagacgcggaggctctcttcagtaaatactgcgcgctgactcttaaggactagaataaaagatctttattttcattagatctgtgtgttggttttttgtgtggcggccgcaacttgtttattgcagcttataatggttacaaataaagcaatagcatcacaaatttcacaaataaagcatttttttcactgcattctagttgtggtttgtccaaactcatcaatgtatcttagcttaacgggcggcgaaggagaagtccacgcctacatgggggtagagtcataatcgtgcatcaggatagggcggtggtgctgcagcagcgcgcgaataaactgctgccgccgccgctccgtcctgcaggaatacaacatggcagtggtctcctcagcgatgattcgcaccgcccgcagcataaggcgccttgtcctccgggcacagcagcgcaccctgatctcacttaaatcagcacagtaactgcagcacagcaccacaatattgttcaaaatcccacagtgcaaggcgctgtatccaaagctcatggcggggaccacagaacccacgtggccatcataccacaagcgcaggtagattaagtggcgacccctcataaacacgctggacataaacattacctcttttggcatgttgtaattcaccacctcccggtaccatataaacctctgattaaacatggcgccatccaccaccatcctaaaccagctggccaaaacctgcccgccggctatacactgcagggaaccgggactggaacaatgacagtggagagcccaggactcgtaaccatggatcatcatgctcgtcatgatatcaatgttggcacaacacaggcacacgtgcatacacttcctcaggattacaagctcctcccgcgttagaaccatatcccagggaacaacccattcctgaatcagcgtaaatcccacactgcagggaagacctcgcacgtaactcacgttgtgcattgtcaaagtgttacattcgggcagcagcggatgatcctccagtatggtagcgcgggtttctgtctcaaaaggaggtagacgatccctactgtacggagtgcgccgagacaaccgagatcgtgttggtcgtagtgtcatgccaaatggaacgccggacgtagtcatatttcctgaagcaaaaccaggtgcgggcgtgacaaacagatctgcgtctccggtctcgccgcttagatcgctctgtgtagtagttgtagtatatccactctctcaaagcatccaggcgccccctggcttcgggttctatgtaaactccttcatgcgccgctgccctgataacatccaccaccgcagaataagccacacccagccaacctacacattcgttctgcgagtcacacacgggaggagcgggaagagctggaagaaccatggtggcatttgcaaaagcctaggcctccaaaaaagcctcctcactacttctggaatagctcagaggccgaggcggcctcggcctctgcataaataaaaaaaattagtcagccatggggcggagaatgggcggaactgggcggagttaggggcgggatgggcggagttaggggcgggactatggttgctgactaattgagatgcatgctttgcatacttctgcctgctggggagcctggggactttccacacctggttgctgactaattgagatgcatgctttgcatacttctgcctgctggggagcctggggactttccacaccctaactgacacacacgttacgtcacttcccattttaagaaaactacaattcccaacacatacaagttactccgcccttaattaaatcggatccgatatctagatgtattcgcgaggtaccgagctcg

SEQ ID NO: 102 - DNA, 8213 bp, synthetic construct
  source 1..8213: mol_type = other DNA
tgcagctctggcccgtgtctcaaaatctctgatgttacattgcacaagataaaaatatatcatcatgaacaataaaactgtctgcttacataaacagtaatacaaggggtgttatgagccatattcaacgggaaacgtcgaggccgcgattaaattccaacatggatgctgatttatatgggtataaatgggctcgcgataatgtcgggcaatcaggtgcgacaatctatcgcttgtatgggaagcccgatgcgccagagttgtttctgaaacatggcaaaggtagcgttgccaatgatgttacagatgagatggtcagactaaactggctgacggaatttatgcctcttccgaccatcaagcattttatccgtactcctgatgatgcatggttactcaccactgcgatccccggaaaaacagcattccaggtattagaagaatatcctgattcaggtgaaaatattgttgatgcgctggcagtgttcctgcgccggttgcattcgattcctgtttgtaattgtccttttaacagcgatcgcgtatttcgtctcgctcaggcgcaatcacgaatgaataacggtttggttgatgcgagtgattttgatgacgagcgtaatggctggcctgttgaacaagtctggaaagaaatgcataaacttttgccattctcaccggattcagtcgtcactcatggtgatttctcacttgataaccttatttttgacgaggggaaattaataggttgtattgatgttggacgagtcggaatcgcagaccgataccaggatcttgccatcctatggaactgcctcggtgagttttctccttcattacagaaacggctttttcaaaaatatggtattgataatcctgatatgaataaattgcagtttcatttgatgctcgatgagtttttctaatcagaattggttaattggttgtaacattattcagattgggcttgatttaaaacttcatttttaatttaaaaggatctaggtgaagatcctttttgataatctcatgaccaaaatcccttaacgtgagttttcgttccactgagcgtcagaccccgtagaaaagatcaaaggatcttcttgagatcctttttttctgcgcgtaatctgctgcttgcaaacaaaaaaaccaccgctaccagcggtggtttgtttgccggatcaagagctaccaactctttttccgaaggtaactggcttcagcagagcgcagataccaaatactgttcttctagtgtagccgtagttaggccaccacttcaagaactctgtagcaccgcctacatacctcgctctgctaatcctgttaccagtggctgctgccagtggcgataagtcgtgtcttaccgggttggactcaagacgatagttaccggataaggcgcagcggtcgggctgaacggggggttcgtgcacacagcccagcttggagcgaacgacctacaccgaactgagatacctacagcgtgagctatgagaaagcgccacgcttcccgaagggagaaaggcggacaggtatccggtaagcggcagggtcggaacaggagagcgcacgagggagcttccagggggaaacgcctggtatctttatagtcctgtcgggtttcgccacctctgacttgagcgtcgatttttgtgatgctcgtcaggggggcggagcctatggaaaaacgccagcaacgcggcctttttacggttcctggccttttgctggccttttgctcacatgttctttcctgcgttatcccctgattctgtggataaccgtattaccgcctttgagtgagctgataccgctcgccgcagccgaacgaccgagcgcagcgagtcagtgagcgaggaagcggaagagcgcccaatacgcaaaccgcctctccccgcgcgttggccgattcattaatgcagctggcacgacaggtttcccgactggaaagcgggcagtgagcgcaacgcaattaatgtgagttagctcactcattaggcaccccaggctttacactttatgcttccggctcgtatgttgtgtggaattgtgagcggataacaatttcacacaggaaacagctatgaccatgattacaccaagcttgcatgcaggcctatccgtagatgtacctggacatccaggtgatgccggcggcggtggtggaggcgcgcggaaagtcgcggacgcggttccagatgttgcgcagcggcaaaaagtgctccatggtcgggacgctctggccggtgaggcgtgcgcagtcgttgacgctctagaccgtgcaaaaggagagcctgtaagcgggcactcttccgtggtctggtggataaattcgcaagggtatcatggcggacgaccggggttcgaaccccggatccggccgtccgccgtgatccatgcggttaccgcccgcgtgtcgaacccaggtgtgcgacgtcagacaacgggggagcgctccttttggcttccttccaggcgcggcggctgctgcgctagcttttttggccactggccgcgcgcggcgtaagcggttaggctggaaagcgaaagcattaagtggctcgctccctgtagccggagggttattttccaagggttgagtcgcaggacccccggttcgagtctcgggccggccggactgcggcgaacgggggtttgcctccccgtcatgcaagaccccgcttgcaaattcctccggaaacagggacgagccccttttttgcttttcccagatgcatccggtgctgcggcagatgcgcccccctcctcagcagcggcaagagcaagagcagcggcagacatgcagggcaccctccccttctcctaccgcgtcaggaggggcaacatcgatccagacatgataagatacattgatgagtttggacaaaccacaactagaatgcagtgaaaaaaatgctttatttgtgaaatttgtgatgctattgctttatttgtaaccattataagctgcaataaacaagtttgtacactctcgggtgattatttacccccacccttgccgtctgcgccgtttaaaaatcaaaggggttctgccgcgcatcgctatgcgccactggcagggacacgttgcgatactggtgtttagtgctccacttaaactcaggcacaaccatccgcggcagctcggtgaagttttcactccacaggctgcgcaccatcaccaacgcgtttagcaggtcgggcgccgatatcttgaagtcgcagttggggcctccgccctgcgcgcgcgagttgcgatacacagggttgcagcactggaacactatcagcgccgggtggtgcacgctggccagcacgctcttgtcggagatcagatccgcgtccaggtcctccgcgttgctcagggcgaacggagtcaactttggtagctgccttcccaaaaagggcgcgtgcccaggctttgagttgcactcgcaccgtagtggcatcaaaaggtgaccgtgcccggtctgggcgttaggatacagcgcctgcataaaagccttgatctgcttaaaagccacctgagcctttgcgccttcagagaagaacatgccgcaagacttgccggaaaactgattggccggacaggccgcgtcgtgcacgcagcaccttgcgtcggtgttggagatctgcaccacatttcggccccaccggttcttcacgatcttggccttgctagactgctccttcagcgcgcgctgcccgttttcgctcgtcacatccatttcaatcacgtgctccttatttatcataatgcttccgtgtagacacttaagctcgccttcgatctcagcgcagcggtgcagccacaacgcgcagcccgtgggctcgtgatgcttgtaggtcacctctgcaaacgactgcaggtacgcctgcaggaatcgccccatcatcgtcacaaaggtcttgttgctggtgaaggtcagctgcaacccgcggtgctcctcgttcagccaggtcttgcatacggccgccagagcttccacttggtcaggcagtagtttgaagttcgcctttagatcgttatccacgtggtacttgtccatcagcgcgcgcgcagcctccatgcccttctcccacgcagacacgatcggcacactcagcgggttcatcaccgtaatttcactttccgcttcgctgggctcttcctcttcctcttgcgtccgcataccacgcgccactgggtcgtcttcattcagccgccgcactgtgcgcttacctcctttgccatgcttgattagcaccggtgggttgctgaaacccaccatttgtagcgccacatcttctctttcttcctcgctgtccacgattacctctggtgatggcgggcgctcgggcttgggagaagggcgcttctttttcttcttgggcgcaatggccaaatccgccgccgaggtcgatggccgcgggctgggtgtgcgcggcaccagcgcgtcttgtgatgagtcttcctcgtcctcggactcgatacgccgcctcatccgcttttttgggggcgcccggggaggcggcggcgacggggacggggacgacacgtcctccatggttgggggacgtcgcgccgcaccgcgtccgcgctcgggggtggtttcgcgctgctcctcttcccgactggccatttccttctcctataggcagaaaaagatccacaaaagcgaagatcagcttcggcgcacgctggaagacgcggaggctctcttcagtaaatactgcgcgctgactcttaaggactagtttcgcgccctttctcaaatttaagcgcgaaaactacgtcatctccagcggccacacccggcgccagcacctgttgtcagcgccattggcgcgccggccggccgaatatcttcatttaaatgtttaaacatcgatgcggccgcgattaggttctacgaagaccaatcccgcccgcctaatgcggagcttaccgcctgcgtcattacccagggccacattcttggccaattgcaagccatcaacaaagcccgccaagagtttctgctacgaaagggacggggggtttacttggacccccagtccggcgaggagctcaacccaatccccccgccgccgcagccctatcagcagcagccgcgggcccttgcttcccaggatggcacccaaaaagaagctgcagctgccgccgccacccacggacgaggaggaatactgggacagtcaggcagaggaggttttggacgaggaggaggaggacatgatggaagactgggagagcctagacgaggaagcttccgaggtcgaagaggtgtcagacgaaacaccgtcaccctcggtcgcattcccctcgccggcgccccagaaatcggcaaccggttccagcatggctacaacctccgctcctcaggcgccgccggcactgcccgttcgccgacccaaccgtagatgggacaccactggaaccagggccggtaagtccaagcagccgccgccgttagcccaagagcaacaacagcgccaaggctaccgctcatggcgcgggcacaagaacgccatagttgcttgcttgcaagactgtgggggcaacatctccttcgcccgccgctttcttctctaccatcacggcgtggccttcccccgtaacatcctgcattactaccgtcatctctacagcccatactgcaccggcggcagcggcagcaacagcagcggccacacagaagcaaaggcgaccggatagcaagactctgacaaagcccaagaaatccacagcggcggcagcagcaggaggaggagcgctgcgtctggcgcccaacgaacccgtatcgacccgcgagcttagaaacaggatttttcccactctgtatgctatatttcaacagagcaggggccaagaacaagagctgaaaataaaaaacaggtctctgcgatccctcacccgcagctgcctgtatcacaaaagcgaagatcagcttcggcgcacgctggaagacgcggaggctctcttcagtaaatactgcgcgctgactcttaaggactagaataaaagatctttattttcattagatctgtgtgttggttttttgtgtggcggccgcaacttgtttattgcagcttataatggttacaaataaagcaatagcatcacaaatttcacaaataaagcatttttttcactgcattctagttgtggtttgtccaaactcatcaatgtatcttagcttaacgggcggcgaaggagaagtccacgcctacatgggggtagagtcataatcgtgcatcaggatagggcggtggtgctgcagcagcgcgcgaataaactgctgccgccgccgctccgtcctgcaggaatacaacatggcagtggtctcctcagcgatgattcgcaccgcccgcagcataaggcgccttgtcctccgggcacagcagcgcaccctgatctcacttaaatcagcacagtaactgcagcacagcaccacaatattgttcaaaatcccacagtgcaaggcgctgtatccaaagctcatggcggggaccacagaacccacgtggccatcataccacaagcgcaggtagattaagtggcgacccctcataaacacgctggacataaacattacctcttttggcatgttgtaattcaccacctcccggtaccatataaacctctgattaaacatggcgccatccaccaccatcctaaaccagctggccaaaacctgcccgccggctatacactgcagggaaccgggactggaacaatgacagtggagagcccaggactcgtaaccatggatcatcatgctcgtcatgatatcaatgttggcacaacacaggcacacgtgcatacacttcctcaggattacaagctcctcccgcgttagaaccatatcccagggaacaacccattcctgaatcagcgtaaatcccacactgcagggaagacctcgcacgtaactcacgttgtgcattgtcaaagtgttacattcgggcagcagcggatgatcctccagtatggtagcgcgggtttctgtctcaaaaggaggtagacgatccctactgtacggagtgcgccgagacaaccgagatcgtgttggtcgtagtgtcatgccaaatggaacgccggacgtagtcatatttcctgaagcaaaaccaggtgcgggcgtgacaaacagatctgcgtctccggtctcgccgcttagatcgctctgtgtagtagttgtagtatatccactctctcaaagcatccaggcgccccctggcttcgggttctatgtaaactccttcatgcgccgctgccctgataacatccaccaccgcagaataagccacacccagccaacctacacattcgttctgcgagtcacacacgggaggagcgggaagagctggaagaaccatggtggcatttgcaaaagcctaggcctccaaaaaagcctcctcactacttctggaatagctcagaggccgaggcggcctcggcctctgcataaataaaaaaaattagtcagccatggggcggagaatgggcggaactgggcggagttaggggcgggatgggcggagttaggggcgggactatggttgctgactaattgagatgcatgctttgcatacttctgcctgctggggagcctggggactttccacacctggttgctgactaattgagatgcatgctttgcatacttctgcctgctggggagcctggggactttccacaccctaactgacacacacgttacgtcacttcccattttaagaaaactacaattcccaacacatacaagttactccgcccttaattaaatcggatccgatatctagatgtattcgcgaggtaccgagctcgaattctctggccgtcgttttacaacgtcgtgactgggaaaaccctggcgttacccaacttaatcgccttgcagcacatccccctttcgccagctggcgtaatagcgaagaggcccgcaccgatcgcccttcccaacagttgcgcagcctgaatggcgaatggcgcctgatgcggtattttctccttacgcatctgtgcggtatttcacaccgcatatggtgcactctcagtacaatctgctctgatgccgcatagttaagccagccccgacacccgccaacacccgctgacgcgccctgacgggcttgtctgctcccggcatccgcttacagacaagctgtgaccgtctccgggagctgcatgtgtcagaggttttcaccgtcatcaccgaaacgcgcga

SEQ ID NO: 103 - DNA, 7358 bp, synthetic construct
  source 1..7358: mol_type = other DNA
aattcagtactcatatgttgacaattaatcatcggcatagtatatcggcatagtataatacgactcactataggagggccaccaaggtgaggaactaaaccatgagccatattcaacgggaaacgtcgaggccgcgattaaattccaacatggatgctgatttatatgggtataaatgggctcgcgataatgtcgggcaatcaggtgcgacaatctatcgcttgtatgggaagcccgatgcgccagagttgtttctgaaacatggcaaaggtagcgttgccaatgatgttacagatgagatggtcagactaaactggctgacggaatttatgccacttccgaccatcaagcattttatccgtactcctgatgatgcatggttactcaccactgcgatccccggaaaaacagcgttccaggtattagaagaatatcctgattcaggtgaaaatattgttgatgcgctggcagtgttcctgcgccggttgcactcgattcctgtttgtaattgtccttttaacagcgatcgcgtatttcgcctcgctcaggcgcaatcacgaatgaataacggtttggttgatgcgagtgattttgatgacgagcgtaatggctggcctgttgaacaagtctggaaagaaatgcataaacttttgccattctcaccggattcagtcgtcactcatggtgatttctcacttgataaccttatttttgacgaggggaaattaataggttgtattgatgttggacgagtcggaatcgcagaccgataccaggatcttgccatcctatggaactgcctcggtgagttttctccttcattacagaaacggctttttcaaaaatatggtattgataatcctgatatgaataaattgcagtttcatttgatgctcgatgagtttttctaataaaaacccgcttcggcgggtttttttatgcatgtgagcaaaaggccagcaaaaggccaggaaccgtaaaaaggccgcgttgctggcgtttttccataggctccgcccccctgacgagcatcacaaaaatcgacgctcaagtcagaggtggcgaaacccgacaggactataaagataccaggcgtttccccctggaagctccctcgtgcgctctcctgttccgaccctgccgcttaccggatacctgtccgcctttctcccttcgggaagcgtggcgctttctcatagctcacgctgtaggtatctcagttcggtgtaggtcgttcgctccaagctgggctgtgtgcacgaaccccccgttcagcccgaccgctgcgccttatccggtaactatcgtcttgagtccaacccggtaagacacgacttatcgccactggcagcagccactggtaacaggattagcagagcgaggtatgtaggcggtgctacagagttcttgaagtggtggcctaactacggctacactagaagaacagtatttggtatctgcgctctgctgaagccagttaccttcggaaaaagagttggtagctcttgatccggcaaacaaaccaccgctggtagcggtggtttttttgtttgcaagcagcagattacgcgcagaaaaaaaggatctcaagaagatcctttgatcttttctacggggtctgacgctcagtggaacgaaaactcacgttaagggattttggtcatgtcgacgttaacaagctttaccctatccgtagatgtacctggacatccaggtgatgccggcggcggtggtggaggcgcgcggaaagtcgcggacgcggttccagatgttgcgcagcggcaaaaagtgctccatggtcgggacgctctggccggtgaggcgtgcgcagtcgttgacgctctagaccgtgcaaaaggagagcctgtaagcgggcactcttccgtggtctggtggataaattcgcaagggtatcatggcggacgaccggggttcgaaccccggatccggccgtccgccgtgatccatgcggttaccgcccgcgtgtcgaacccaggtgtgcgacgtcagacaacgggggagcgctccttttggcttccttccaggcgcggcggctgctgcgctagcttttttggccactggccgcgcgcggcgtaagcggttaggctggaaagcgaaagcattaagtggctcgctccctgtagccggagggttattttccaagggttgagtcgcaggacccccggttcgagtctcgggccggccggactgcggcgaacgggggtttgcctccccgtcatgcaagaccccgcttgcaaattcctccggaaacagggacgagccccttttttgcttttcccagatgcatccggtgctgcggcagatgcgcccccctcctcagcagcggcaagagcaagagcagcggcagacatgcagggcaccctccccttctcctaccgcgtcaggaggggcaacatcgatccagacatgataagatacattgatgagtttggacaaaccacaactagaatgcagtgaaaaaaatgctttatttgtgaaatttgtgatgctattgctttatttgtaaccattataagctgcaataaacaagtttgtacactctcgggtgattatttacccccacccttgccgtctgcgccgtttaaaaatcaaaggggttctgccgcgcatcgctatgcgccactggcagggacacgttgcgatactggtgtttagtgctccacttaaactcaggcacaaccatccgcggcagctcggtgaagttttcactccacaggctgcgcaccatcaccaacgcgtttagcaggtcgggcgccgatatcttgaagtcgcagttggggcctccgccctgcgcgcgcgagttgcgatacacagggttgcagcactggaacactatcagcgccgggtggtgcacgctggccagcacgctcttgtcggagatcagatccgcgtccaggtcctccgcgttgctcagggcgaacggagtcaactttggtagctgccttcccaaaaagggcgcgtgcccaggctttgagttgcactcgcaccgtagtggcatcaaaaggtgaccgtgcccggtctgggcgttaggatacagcgcctgcataaaagccttgatctgcttaaaagccacctgagcctttgcgccttcagagaagaacatgccgcaagacttgccggaaaactgattggccggacaggccgcgtcgtgcacgcagcaccttgcgtcggtgttggagatctgcaccacatttcggccccaccggttcttcacgatcttggccttgctagactgctccttcagcgcgcgctgcccgttttcgctcgtcacatccatttcaatcacgtgctccttatttatcataatgcttccgtgtagacacttaagctcgccttcgatctcagcgcagcggtgcagccacaacgcgcagcccgtgggctcgtgatgcttgtaggtcacctctgcaaacgactgcaggtacgcctgcaggaatcgccccatcatcgtcacaaaggtcttgttgctggtgaaggtcagctgcaacccgcggtgctcctcgttcagccaggtcttgcatacggccgccagagcttccacttggtcaggcagtagtttgaagttcgcctttagatcgttatccacgtggtacttgtccatcagcgcgcgcgcagcctccatgcccttctcccacgcagacacgatcggcacactcagcgggttcatcaccgtaatttcactttccgcttcgctgggctcttcctcttcctcttgcgtccgcataccacgcgccactgggtcgtcttcattcagccgccgcactgtgcgcttacctcctttgccatgcttgattagcaccggtgggttgctgaaacccaccatttgtagcgccacatcttctctttcttcctcgctgtccacgattacctctggtgatggcgggcgctcgggcttgggagaagggcgcttctttttcttcttgggcgcaatggccaaatccgccgccgaggtcgatggccgcgggctgggtgtgcgcggcaccagcgcgtcttgtgatgagtcttcctcgtcctcggactcgatacgccgcctcatccgcttttttgggggcgcccggggaggcggcggcgacggggacggggacgacacgtcctccatggttgggggacgtcgcgccgcaccgcgtccgcgctcgggggtggtttcgcgctgctcctcttcccgactggccatttccttctcctataggcagaaaaagatccacaaaagcgaagatcagcttcggcgcacgctggaagacgcggaggctctcttcagtaaatactgcgcgctgactcttaaggactagtttcgcgccctttctcaaatttaagcgcgaaaactacgtcatctccagcggccacacccggcgccagcacctgttgtcagcgccattggcgcgccggccggccgaatatcttcatttaaatgattaggttctacgaagaccaatcccgcccgcctaatgcggagcttaccgcctgcgtcattacccagggccacattcttggccaattgcaagccatcaacaaagcccgccaagagtttctgctacgaaagggacggggggtttacttggacccccagtccggcgaggagctcaacccaatccccccgccgccgcagccctatcagcagcagccgcgggcccttgcttcccaggatggcacccaaaaagaagctgcagctgccgccgccacccacggacgaggaggaatactgggacagtcaggcagaggaggttttggacgaggaggaggaggacatgatggaagactgggagagcctagacgaggaagcttccgaggtcgaagaggtgtcagacgaaacaccgtcaccctcggtcgcattcccctcgccggcgccccagaaatcggcaaccggttccagcatggctacaacctccgctcctcaggcgccgccggcactgcccgttcgccgacccaaccgtagatgggacaccactggaaccagggccggtaagtccaagcagccgccgccgttagcccaagagcaacaacagcgccaaggctaccgctcatggcgcgggcacaagaacgccatagttgcttgcttgcaagactgtgggggcaacatctccttcgcccgccgctttcttctctaccatcacggcgtggccttcccccgtaacatcctgcattactaccgtcatctctacagcccatactgcaccggcggcagcggcagcaacagcagcggccacacagaagcaaaggcgaccggatagcaagactctgacaaagcccaagaaatccacagcggcggcagcagcaggaggaggagcgctgcgtctggcgcccaacgaacccgtatcgacccgcgagcttagaaacaggatttttcccactctgtatgctatatttcaacagagcaggggccaagaacaagagctgaaaataaaaaacaggtctctgcgatccctcacccgcagctgcctgtatcacaaaagcgaagatcagcttcggcgcacgctggaagacgcggaggctctcttcagtaaatactgcgcgctgactcttaaggactagaataaaagatctttattttcattagatctgtgtgttggttttttgtgtggcggccgcaacttgtttattgcagcttataatggttacaaataaagcaatagcatcacaaatttcacaaataaagcatttttttcactgcattctagttgtggtttgtccaaactcatcaatgtatcttagcttaacgggcggcgaaggagaagtccacgcctacatgggggtagagtcataatcgtgcatcaggatagggcggtggtgctgcagcagcgcgcgaataaactgctgccgccgccgctccgtcctgcaggaatacaacatggcagtggtctcctcagcgatgattcgcaccgcccgcagcataaggcgccttgtcctccgggcacagcagcgcaccctgatctcacttaaatcagcacagtaactgcagcacagcaccacaatattgttcaaaatcccacagtgcaaggcgctgtatccaaagctcatggcggggaccacagaacccacgtggccatcataccacaagcgcaggtagattaagtggcgacccctcataaacacgctggacataaacattacctcttttggcatgttgtaattcaccacctcccggtaccatataaacctctgattaaacatggcgccatccaccaccatcctaaaccagctggccaaaacctgcccgccggctatacactgcagggaaccgggactggaacaatgacagtggagagcccaggactcgtaaccatggatcatcatgctcgtcatgatatcaatgttggcacaacacaggcacacgtgcatacacttcctcaggattacaagctcctcccgcgttagaaccatatcccagggaacaacccattcctgaatcagcgtaaatcccacactgcagggaagacctcgcacgtaactcacgttgtgcattgtcaaagtgttacattcgggcagcagcggatgatcctccagtatggtagcgcgggtttctgtctcaaaaggaggtagacgatccctactgtacggagtgcgccgagacaaccgagatcgtgttggtcgtagtgtcatgccaaatggaacgccggacgtagtcatatttcctgaagcaaaaccaggtgcgggcgtgacaaacagatctgcgtctccggtctcgccgcttagatcgctctgtgtagtagttgtagtatatccactctctcaaagcatccaggcgccccctggcttcgggttctatgtaaactccttcatgcgccgctgccctgataacatccaccaccgcagaataagccacacccagccaacctacacattcgttctgcgagtcacacacgggaggagcgggaagagctggaagaaccatggtggcatttgcaaaagcctaggcctccaaaaaagcctcctcactacttctggaatagctcagaggccgaggcggcctcggcctctgcataaataaaaaaaattagtcagccatggggcggagaatgggcggaactgggcggagttaggggcgggatgggcggagttaggggcgggactatggttgctgactaattgagatgcatgctttgcatacttctgcctgctggggagcctggggactttccacacctggttgctgactaattgagatgcatgctttgcatacttctgcctgctggggagcctggggactttccacaccctaactgacacacacgttacgtcacttcccattttaagaaaactacaattcccaacacatacaagttactccgcccttaattaaatcggatccgatatctagatgtattcgcgaggtaccgagctcg

SEQ ID NO: 104 - DNA, 8491 bp, synthetic construct
  source 1..8491: mol_type = other DNA
tgcagctctggcccgtgtctcaaaatctctgatgttacattgcacaagataaaaatatatcatcatgaacaataaaactgtctgcttacataaacagtaatacaaggggtgttatgagccatattcaacgggaaacgtcgaggccgcgattaaattccaacatggatgctgatttatatgggtataaatgggctcgcgataatgtcgggcaatcaggtgcgacaatctatcgcttgtatgggaagcccgatgcgccagagttgtttctgaaacatggcaaaggtagcgttgccaatgatgttacagatgagatggtcagactaaactggctgacggaatttatgcctcttccgaccatcaagcattttatccgtactcctgatgatgcatggttactcaccactgcgatccccggaaaaacagcattccaggtattagaagaatatcctgattcaggtgaaaatattgttgatgcgctggcagtgttcctgcgccggttgcattcgattcctgtttgtaattgtccttttaacagcgatcgcgtatttcgtctcgctcaggcgcaatcacgaatgaataacggtttggttgatgcgagtgattttgatgacgagcgtaatggctggcctgttgaacaagtctggaaagaaatgcataaacttttgccattctcaccggattcagtcgtcactcatggtgatttctcacttgataaccttatttttgacgaggggaaattaataggttgtattgatgttggacgagtcggaatcgcagaccgataccaggatcttgccatcctatggaactgcctcggtgagttttctccttcattacagaaacggctttttcaaaaatatggtattgataatcctgatatgaataaattgcagtttcatttgatgctcgatgagtttttctaatcagaattggttaattggttgtaacattattcagattgggcttgatttaaaacttcatttttaatttaaaaggatctaggtgaagatcctttttgataatctcatgaccaaaatcccttaacgtgagttttcgttccactgagcgtcagaccccgtagaaaagatcaaaggatcttcttgagatcctttttttctgcgcgtaatctgctgcttgcaaacaaaaaaaccaccgctaccagcggtggtttgtttgccggatcaagagctaccaactctttttccgaaggtaactggcttcagcagagcgcagataccaaatactgttcttctagtgtagccgtagttaggccaccacttcaagaactctgtagcaccgcctacatacctcgctctgctaatcctgttaccagtggctgctgccagtggcgataagtcgtgtcttaccgggttggactcaagacgatagttaccggataaggcgcagcggtcgggctgaacggggggttcgtgcacacagcccagcttggagcgaacgacctacaccgaactgagatacctacagcgtgagctatgagaaagcgccacgcttcccgaagggagaaaggcggacaggtatccggtaagcggcagggtcggaacaggagagcgcacgagggagcttccagggggaaacgcctggtatctttatagtcctgtcgggtttcgccacctctgacttgagcgtcgatttttgtgatgctcgtcaggggggcggagcctatggaaaaacgccagcaacgcggcctttttacggttcctggccttttgctggccttttgctcacatgttctttcctgcgttatcccctgattctgtggataaccgtattaccgcctttgagtgagctgataccgctcgccgcagccgaacgaccgagcgcagcgagtcagtgagcgaggaagcggaagagcgcccaatacgcaaaccgcctctccccgcgcgttggccgattcattaatgcagctggcacgacaggtttcccgactggaaagcgggcagtgagcgcaacgcaattaatgtgagttagctcactcattaggcaccccaggctttacactttatgcttccggctcgtatgttgtgtggaattgtgagcggataacaatttcacacaggaaacagctatgaccatgattacaccaagcttgcatgcaggcctatccgtagatgtacctggacatccaggtgatgccggcggcggtggtggaggcgcgcggaaagtcgcggacgcggttccagatgttgcgcagcggcaaaaagtgctccatggtcgggacgctctggccggtgaggcgtgcgcagtcgttgacgctctagaccgtgcaaaaggagagcctgtaagcgggcactcttccgtggtctggtggataaattcgcaagggtatcatggcggacgaccggggttcgaaccccggatccggccgtccgccgtgatccatgcggttaccgcccgcgtgtcgaacccaggtgtgcgacgtcagacaacgggggagcgctccttttggcttccttccaggcgcggcggctgctgcgctagcttttttggccactggccgcgcgcggcgtaagcggttaggctggaaagcgaaagcattaagtggctcgctccctgtagccggagggttattttccaagggttgagtcgcaggacccccggttcgagtctcgggccggccggactgcggcgaacgggggtttgcctccccgtcatgcaagaccccgcttgcaaattcctccggaaacagggacgagccccttttttgcttttcccagatgcatccggtgctgcggcagatgcgcccccctcctcagcagcggcaagagcaagagcagcggcagacatgcagggcaccctccccttctcctaccgcgtcaggaggggcaacatcgatccagacatgataagatacattgatgagtttggacaaaccacaactagaatgcagtgaaaaaaatgctttatttgtgaaatttgtgatgctattgctttatttgtaaccattataagctgcaataaacaagtttgtacactctcgggtgattatttacccccacccttgccgtctgcgccgtttaaaaatcaaaggggttctgccgcgcatcgctatgcgccactggcagggacacgttgcgatactggtgtttagtgctccacttaaactcaggcacaaccatccgcggcagctcggtgaagttttcactccacaggctgcgcaccatcaccaacgcgtttagcaggtcgggcgccgatatcttgaagtcgcagttggggcctccgccctgcgcgcgcgagttgcgatacacagggttgcagcactggaacactatcagcgccgggtggtgcacgctggccagcacgctcttgtcggagatcagatccgcgtccaggtcctccgcgttgctcagggcgaacggagtcaactttggtagctgccttcccaaaaagggcgcgtgcccaggctttgagttgcactcgcaccgtagtggcatcaaaaggtgaccgtgcccggtctgggcgttaggatacagcgcctgcataaaagccttgatctgcttaaaagccacctgagcctttgcgccttcagagaagaacatgccgcaagacttgccggaaaactgattggccggacaggccgcgtcgtgcacgcagcaccttgcgtcggtgttggagatctgcaccacatttcggccccaccggttcttcacgatcttggccttgctagactgctccttcagcgcgcgctgcccgttttcgctcgtcacatccatttcaatcacgtgctccttatttatcataatgcttccgtgtagacacttaagctcgccttcgatctcagcgcagcggtgcagccacaacgcgcagcccgtgggctcgtgatgcttgtaggtcacctctgcaaacgactgcaggtacgcctgcaggaatcgccccatcatcgtcacaaaggtcttgttgctggtgaaggtcagctgcaacccgcggtgctcctcgttcagccaggtcttgcatacggccgccagagcttccacttggtcaggcagtagtttgaagttcgcctttagatcgttatccacgtggtacttgtccatcagcgcgcgcgcagcctccatgcccttctcccacgcagacacgatcggcacactcagcgggttcatcaccgtaatttcactttccgcttcgctgggctcttcctcttcctcttgcgtccgcataccacgcgccactgggtcgtcttcattcagccgccgcactgtgcgcttacctcctttgccatgcttgattagcaccggtgggttgctgaaacccaccatttgtagcgccacatcttctctttcttcctcgctgtccacgattacctctggtgatggcgggcgctcgggcttgggagaagggcgcttctttttcttcttgggcgcaatggccaaatccgccgccgaggtcgatggccgcgggctgggtgtgcgcggcaccagcgcgtcttgtgatgagtcttcctcgtcctcggactcgatacgccgcctcatccgcttttttgggggcgcccggggaggcggcggcgacggggacggggacgacacgtcctccatggttgggggacgtcgcgccgcaccgcgtccgcgctcgggggtggtttcgcgctgctcctcttcccgactggccatttccttctcctataggcagaaaaagatccacaaaagcgaagatcagcttcggcgcacgctggaagacgcggaggctctcttcagtaaatactgcgcgctgactcttaaggactagtttcgcgccctttctcaaatttaagcgcgaaaactacgtcatctccagcggccacacccggcgccagcacctgttgtcagcgccattggcgcgcccgcccgccgcgcgcttcgctttttatagggccgccgccgccgccgcctcgccataaaaggaaactttcggagcgcgccgctctgattggctgccgccgcacctctccgcctcgccccgccccgcccctcgccccgccccgccccgcctggcgcgcgccccccccccccccccgcccccatcgctgcacaaaataattaaaaaataaataaatacaaaattgggggtggggaggggggggagatggggagagtgaagcagaacgtggggctcacctcgaggccggccgaatatcttcatttaaatgtttaaacatcgatgcggccgcgattaggttctacgaagaccaatcccgcccgcctaatgcggagcttaccgcctgcgtcattacccagggccacattcttggccaattgcaagccatcaacaaagcccgccaagagtttctgctacgaaagggacggggggtttacttggacccccagtccggcgaggagctcaacccaatccccccgccgccgcagccctatcagcagcagccgcgggcccttgcttcccaggatggcacccaaaaagaagctgcagctgccgccgccacccacggacgaggaggaatactgggacagtcaggcagaggaggttttggacgaggaggaggaggacatgatggaagactgggagagcctagacgaggaagcttccgaggtcgaagaggtgtcagacgaaacaccgtcaccctcggtcgcattcccctcgccggcgccccagaaatcggcaaccggttccagcatggctacaacctccgctcctcaggcgccgccggcactgcccgttcgccgacccaaccgtagatgggacaccactggaaccagggccggtaagtccaagcagccgccgccgttagcccaagagcaacaacagcgccaaggctaccgctcatggcgcgggcacaagaacgccatagttgcttgcttgcaagactgtgggggcaacatctccttcgcccgccgctttcttctctaccatcacggcgtggccttcccccgtaacatcctgcattactaccgtcatctctacagcccatactgcaccggcggcagcggcagcaacagcagcggccacacagaagcaaaggcgaccggatagcaagactctgacaaagcccaagaaatccacagcggcggcagcagcaggaggaggagcgctgcgtctggcgcccaacgaacccgtatcgacccgcgagcttagaaacaggatttttcccactctgtatgctatatttcaacagagcaggggccaagaacaagagctgaaaataaaaaacaggtctctgcgatccctcacccgcagctgcctgtatcacaaaagcgaagatcagcttcggcgcacgctggaagacgcggaggctctcttcagtaaatactgcgcgctgactcttaaggactagaataaaagatctttattttcattagatctgtgtgttggttttttgtgtggcggccgcaacttgtttattgcagcttataatggttacaaataaagcaatagcatcacaaatttcacaaataaagcatttttttcactgcattctagttgtggtttgtccaaactcatcaatgtatcttagcttaacgggcggcgaaggagaagtccacgcctacatgggggtagagtcataatcgtgcatcaggatagggcggtggtgctgcagcagcgcgcgaataaactgctgccgccgccgctccgtcctgcaggaatacaacatggcagtggtctcctcagcgatgattcgcaccgcccgcagcataaggcgccttgtcctccgggcacagcagcgcaccctgatctcacttaaatcagcacagtaactgcagcacagcaccacaatattgttcaaaatcccacagtgcaaggcgctgtatccaaagctcatggcggggaccacagaacccacgtggccatcataccacaagcgcaggtagattaagtggcgacccctcataaacacgctggacataaacattacctcttttggcatgttgtaattcaccacctcccggtaccatataaacctctgattaaacatggcgccatccaccaccatcctaaaccagctggccaaaacctgcccgccggctatacactgcagggaaccgggactggaacaatgacagtggagagcccaggactcgtaaccatggatcatcatgctcgtcatgatatcaatgttggcacaacacaggcacacgtgcatacacttcctcaggattacaagctcctcccgcgttagaaccatatcccagggaacaacccattcctgaatcagcgtaaatcccacactgcagggaagacctcgcacgtaactcacgttgtgcattgtcaaagtgttacattcgggcagcagcggatgatcctccagtatggtagcgcgggtttctgtctcaaaaggaggtagacgatccctactgtacggagtgcgccgagacaaccgagatcgtgttggtcgtagtgtcatgccaaatggaacgccggacgtagtcatatttcctgaagcaaaaccaggtgcgggcgtgacaaacagatctgcgtctccggtctcgccgcttagatcgctctgtgtagtagttgtagtatatccactctctcaaagcatccaggcgccccctggcttcgggttctatgtaaactccttcatgcgccgctgccctgataacatccaccaccgcagaataagccacacccagccaacctacacattcgttctgcgagtcacacacgggaggagcgggaagagctggaagaaccatggtggcatttgcaaaagcctaggcctccaaaaaagcctcctcactacttctggaatagctcagaggccgaggcggcctcggcctctgcataaataaaaaaaattagtcagccatggggcggagaatgggcggaactgggcggagttaggggcgggatgggcggagttaggggcgggactatggttgctgactaattgagatgcatgctttgcatacttctgcctgctggggagcctggggactttccacacctggttgctgactaattgagatgcatgctttgcatacttctgcctgctggggagcctggggactttccacaccctaactgacacacacgttacgtcacttcccattttaagaaaactacaattcccaacacatacaagttactccgcccttaattaaatcggatccgatatctagatgtattcgcgaggtaccgagctcgaattctctggccgtcgttttacaacgtcgtgactgggaaaaccctggcgttacccaacttaatcgccttgcagcacatccccctttcgccagctggcgtaatagcgaagaggcccgcaccgatcgcccttcccaacagttgcgcagcctgaatggcgaatggcgcctgatgcggtattttctccttacgcatctgtgcggtatttcacaccgcatatggtgcactctcagtacaatctgctctgatgccgcatagttaagccagccccgacacccgccaacacccgctgacgcgccctgacgggcttgtctgctcccggcatccgcttacagacaagctgtgaccgtctccgggagctgcatgtgtcagaggttttcaccgtcatcaccgaaacgcgcga

SEQ ID NO: 105 - DNA, 7658 bp, synthetic construct
  source 1..7658: mol_type = other DNA
aattcagtactcatatgttgacaattaatcatcggcatagtatatcggcatagtataatacgactcactataggagggccaccaaggtgaggaactaaaccatgagccatattcaacgggaaacgtcgaggccgcgattaaattccaacatggatgctgatttatatgggtataaatgggctcgcgataatgtcgggcaatcaggtgcgacaatctatcgcttgtatgggaagcccgatgcgccagagttgtttctgaaacatggcaaaggtagcgttgccaatgatgttacagatgagatggtcagactaaactggctgacggaatttatgccacttccgaccatcaagcattttatccgtactcctgatgatgcatggttactcaccactgcgatccccggaaaaacagcgttccaggtattagaagaatatcctgattcaggtgaaaatattgttgatgcgctggcagtgttcctgcgccggttgcactcgattcctgtttgtaattgtccttttaacagcgatcgcgtatttcgcctcgctcaggcgcaatcacgaatgaataacggtttggttgatgcgagtgattttgatgacgagcgtaatggctggcctgttgaacaagtctggaaagaaatgcataaacttttgccattctcaccggattcagtcgtcactcatggtgatttctcacttgataaccttatttttgacgaggggaaattaataggttgtattgatgttggacgagtcggaatcgcagaccgataccaggatcttgccatcctatggaactgcctcggtgagttttctccttcattacagaaacggctttttcaaaaatatggtattgataatcctgatatgaataaattgcagtttcatttgatgctcgatgagtttttctaataaaaacccgcttcggcgggtttttttatgcatgtgagcaaaaggccagcaaaaggccaggaaccgtaaaaaggccgcgttgctggcgtttttccataggctccgcccccctgacgagcatcacaaaaatcgacgctcaagtcagaggtggcgaaacccgacaggactataaagataccaggcgtttccccctggaagctccctcgtgcgctctcctgttccgaccctgccgcttaccggatacctgtccgcctttctcccttcgggaagcgtggcgctttctcatagctcacgctgtaggtatctcagttcggtgtaggtcgttcgctccaagctgggctgtgtgcacgaaccccccgttcagcccgaccgctgcgccttatccggtaactatcgtcttgagtccaacccggtaagacacgacttatcgccactggcagcagccactggtaacaggattagcagagcgaggtatgtaggcggtgctacagagttcttgaagtggtggcctaactacggctacactagaagaacagtatttggtatctgcgctctgctgaagccagttaccttcggaaaaagagttggtagctcttgatccggcaaacaaaccaccgctggtagcggtggtttttttgtttgcaagcagcagattacgcgcagaaaaaaaggatctcaagaagatcctttgatcttttctacggggtctgacgctcagtggaacgaaaactcacgttaagggattttggtcatgtcgacgttaacaagctttaccctatccgtagatgtacctggacatccaggtgatgccggcggcggtggtggaggcgcgcggaaagtcgcggacgcggttccagatgttgcgcagcggcaaaaagtgctccatggtcgggacgctctggccggtgaggcgtgcgcagtcgttgacgctctagaccgtgcaaaaggagagcctgtaagcgggcactcttccgtggtctggtggataaattcgcaagggtatcatggcggacgaccggggttcgaaccccggatccggccgtccgccgtgatccatgcggttaccgcccgcgtgtcgaacccaggtgtgcgacgtcagacaacgggggagcgctccttttggcttccttccaggcgcggcggctgctgcgctagcttttttggccactggccgcgcgcggcgtaagcggttaggctggaaagcgaaagcattaagtggctcgctccctgtagccggagggttattttccaagggttgagtcgcaggacccccggttcgagtctcgggccggccggactgcggcgaacgggggtttgcctccccgtcatgcaagaccccgcttgcaaattcctccggaaacagggacgagccccttttttgcttttcccagatgcatccggtgctgcggcagatgcgcccccctcctcagcagcggcaagagcaagagcagcggcagacatgcagggcaccctccccttctcctaccgcgtcaggaggggcaacatcgatccagacatgataagatacattgatgagtttggacaaaccacaactagaatgcagtgaaaaaaatgctttatttgtgaaatttgtgatgctattgctttatttgtaaccattataagctgcaataaacaagtttgtacactctcgggtgattatttacccccacccttgccgtctgcgccgtttaaaaatcaaaggggttctgccgcgcatcgctatgcgccactggcagggacacgttgcgatactggtgtttagtgctccacttaaactcaggcacaaccatccgcggcagctcggtgaagttttcactccacaggctgcgcaccatcaccaacgcgtttagcaggtcgggcgccgatatcttgaagtcgcagttggggcctccgccctgcgcgcgcgagttgcgatacacagggttgcagcactggaacactatcagcgccgggtggtgcacgctggccagcacgctcttgtcggagatcagatccgcgtccaggtcctccgcgttgctcagggcgaacggagtcaactttggtagctgccttcccaaaaagggcgcgtgcccaggctttgagttgcactcgcaccgtagtggcatcaaaaggtgaccgtgcccggtctgggcgttaggatacagcgcctgcataaaagccttgatctgcttaaaagccacctgagcctttgcgccttcagagaagaacatgccgcaagacttgccggaaaactgattggccggacaggccgcgtcgtgcacgcagcaccttgcgtcggtgttggagatctgcaccacatttcggccccaccggttcttcacgatcttggccttgctagactgctccttcagcgcgcgctgcccgttttcgctcgtcacatccatttcaatcacgtgctccttatttatcataatgcttccgtgtagacacttaagctcgccttcgatctcagcgcagcggtgcagccacaacgcgcagcccgtgggctcgtgatgcttgtaggtcacctctgcaaacgactgcaggtacgcctgcaggaatcgccccatcatcgtcacaaaggtcttgttgctggtgaaggtcagctgcaacccgcggtgctcctcgttcagccaggtcttgcatacggccgccagagcttccacttggtcaggcagtagtttgaagttcgcctttagatcgttatccacgtggtacttgtccatcagcgcgcgcgcagcctccatgcccttctcccacgcagacacgatcggcacactcagcgggttcatcaccgtaatttcactttccgcttcgctgggctcttcctcttcctcttgcgtccgcataccacgcgccactgggtcgtcttcattcagccgccgcactgtgcgcttacctcctttgccatgcttgattagcaccggtgggttgctgaaacccaccatttgtagcgccacatcttctctttcttcctcgctgtccacgattacctctggtgatggcgggcgctcgggcttgggagaagggcgcttctttttcttcttgggcgcaatggccaaatccgccgccgaggtcgatggccgcgggctgggtgtgcgcggcaccagcgcgtcttgtgatgagtcttcctcgtcctcggactcgatacgccgcctcatccgcttttttgggggcgcccggggaggcggcggcgacggggacggggacgacacgtcctccatggttgggggacgtcgcgccgcaccgcgtccgcgctcgggggtggtttcgcgctgctcctcttcccgactggccatttccttctcctataggcagaaaaagatccacaaaagcgaagatcagcttcggcgcacgctggaagacgcggaggctctcttcagtaaatactgcgcgctgactcttaaggactagtttcgcgccctttctcaaatttaagcgcgaaaactacgtcatctccagcggccacacccggcgccagcacctgttgtcagcgccattggcgcgcccgcccgccgcgcgcttcgctttttatagggccgccgccgccgccgcctcgccataaaaggaaactttcggagcgcgccgctctgattggctgccgccgcacctctccgcctcgccccgccccgcccctcgccccgccccgccccgcctggcgcgcgccccccccccccccccgcccccatcgctgcacaaaataattaaaaaataaataaatacaaaattgggggtggggaggggggggagatggggagagtgaagcagaacgtggggctcacctcgaggccggccgaatatcttcatttaaatgtttaaacatcgatgcggccgcgattaggttctacgaagaccaatcccgcccgcctaatgcggagcttaccgcctgcgtcattacccagggccacattcttggccaattgcaagccatcaacaaagcccgccaagagtttctgctacgaaagggacggggggtttacttggacccccagtccggcgaggagctcaacccaatccccccgccgccgcagccctatcagcagcagccgcgggcccttgcttcccaggatggcacccaaaaagaagctgcagctgccgccgccacccacggacgaggaggaatactgggacagtcaggcagaggaggttttggacgaggaggaggaggacatgatggaagactgggagagcctagacgaggaagcttccgaggtcgaagaggtgtcagacgaaacaccgtcaccctcggtcgcattcccctcgccggcgccccagaaatcggcaaccggttccagcatggctacaacctccgctcctcaggcgccgccggcactgcccgttcgccgacccaaccgtagatgggacaccactggaaccagggccggtaagtccaagcagccgccgccgttagcccaagagcaacaacagcgccaaggctaccgctcatggcgcgggcacaagaacgccatagttgcttgcttgcaagactgtgggggcaacatctccttcgcccgccgctttcttctctaccatcacggcgtggccttcccccgtaacatcctgcattactaccgtcatctctacagcccatactgcaccggcggcagcggcagcaacagcagcggccacacagaagcaaaggcgaccggatagcaagactctgacaaagcccaagaaatccacagcggcggcagcagcaggaggaggagcgctgcgtctggcgcccaacgaacccgtatcgacccgcgagcttagaaacaggatttttcccactctgtatgctatatttcaacagagcaggggccaagaacaagagctgaaaataaaaaacaggtctctgcgatccctcacccgcagctgcctgtatcacaaaagcgaagatcagcttcggcgcacgctggaagacgcggaggctctcttcagtaaatactgcgcgctgactcttaaggactagaataaaagatctttattttcattagatctgtgtgttggttttttgtgtggcggccgcaacttgtttattgcagcttataatggttacaaataaagcaatagcatcacaaatttcacaaataaagcatttttttcactgcattctagttgtggtttgtccaaactcatcaatgtatcttagcttaacgggcggcgaaggagaagtccacgcctacatgggggtagagtcataatcgtgcatcaggatagggcggtggtgctgcagcagcgcgcgaataaactgctgccgccgccgctccgtcctgcaggaatacaacatggcagtggtctcctcagcgatgattcgcaccgcccgcagcataaggcgccttgtcctccgggcacagcagcgcaccctgatctcacttaaatcagcacagtaactgcagcacagcaccacaatattgttcaaaatcccacagtgcaaggcgctgtatccaaagctcatggcggggaccacagaacccacgtggccatcataccacaagcgcaggtagattaagtggcgacccctcataaacacgctggacataaacattacctcttttggcatgttgtaattcaccacctcccggtaccatataaacctctgattaaacatggcgccatccaccaccatcctaaaccagctggccaaaacctgcccgccggctatacactgcagggaaccgggactggaacaatgacagtggagagcccaggactcgtaaccatggatcatcatgctcgtcatgatatcaatgttggcacaacacaggcacacgtgcatacacttcctcaggattacaagctcctcccgcgttagaaccatatcccagggaacaacccattcctgaatcagcgtaaatcccacactgcagggaagacctcgcacgtaactcacgttgtgcattgtcaaagtgttacattcgggcagcagcggatgatcctccagtatggtagcgcgggtttctgtctcaaaaggaggtagacgatccctactgtacggagtgcgccgagacaaccgagatcgtgttggtcgtagtgtcatgccaaatggaacgccggacgtagtcatatttcctgaagcaaaaccaggtgcgggcgtgacaaacagatctgcgtctccggtctcgccgcttagatcgctctgtgtagtagttgtagtatatccactctctcaaagcatccaggcgccccctggcttcgggttctatgtaaactccttcatgcgccgctgccctgataacatccaccaccgcagaataagccacacccagccaacctacacattcgttctgcgagtcacacacgggaggagcgggaagagctggaagaaccatggtggcatttgcaaaagcctaggcctccaaaaaagcctcctcactacttctggaatagctcagaggccgaggcggcctcggcctctgcataaataaaaaaaattagtcagccatggggcggagaatgggcggaactgggcggagttaggggcgggatgggcggagttaggggcgggactatggttgctgactaattgagatgcatgctttgcatacttctgcctgctggggagcctggggactttccacacctggttgctgactaattgagatgcatgctttgcatacttctgcctgctggggagcctggggactttccacaccctaactgacacacacgttacgtcacttcccattttaagaaaactacaattcccaacacatacaagttactccgcccttaattaaatcggatccgatatctagatgtattcgcgaggtaccgagctcg

SEQ ID NO: 106 - DNA, 3029 bp, synthetic construct
  source 1..3029: mol_type = other DNA
cacacaaaaaaccaacacacagatctaatgaaaataaagatcttttattctagtccttaagagtcagcgcgcagtatttactgaagagagcctccgcgtcttccagcgtgcgccgaagctgatcttcgcttttgtgatacaggcagctgcgggtgagggatcgcagagacctgttttttattttcagctcttgttcttggcccctgctctgttgaaatatagcatacagagtgggaaaaatcctgtttctaagctcgcgggtcgatacgggttcgttgggcgccagacgcagcgctcctcctcctgctgctgccgccgctgtggatttcttgggctttgtcagagtcttgctatccggtcgcctttgcttctgtgtggccgctgctgttgctgccgctgccgccggtgcagtatgggctgtagagatgacggtagtaatgcaggatgttacgggggaaggccacgccgtgatggtagagaagaaagcggcgggcgaaggagatgttgcccccacagtcttgcaagcaagcaactatggcgttcttgtgcccgcgccatgagcggtagccttggcgctgttgttgctcttgggctaacggcggcggctgcttggacttaccggccctggttccagtggtgtcccatctacggttgggtcggcgaacgggcagtgccggcggcgcctgaggagcggaggttgtagccatgctggaaccggttgccgatttctggggcgccggcgaggggaatgcgaccgagggtgacggtgtttcgtctgacacctcttcgacctcggaagcttcctcgtctaggctctcccagtcttccatcatgtcctcctcctcctcgtccaaaacctcctctgcctgactgtcccagtattcctcctcgtccgtgggtggcggcggcagctgcagcttctttttgggtgccatcctgggaagcaagggcccgcggctgctgctgatagggctgcggcggcggggggattgggttgagctcctcgccggactgggggtccaagtaaaccccccgtccctttcgtagcagaaactcttggcgggctttgttgatggcttgcaattggccaagaatgtggccctgggtaatgacgcaggcggtaagctccgcattaggcgggcgggattggtcttcgtagaacctaatcatttaaatgaagatattcggccggccggcgcgccaatggcgctgacaacaggtgctggcgccgggtgtggccgctggagatgacgtagttttcgcgcttaaatttgagaaagggcgcgaaactagtccttaagagtcagcgcgcagtatttactgaagagagcctccgcgtcttccagcgtgcgccgaagctgatcttcgcttttgtggatctttttctgcctataggagaaggaaatggccagtcgggaagaggagcagcgcgaaaccacccccgagcgcggacgcggtgcggcgcgacgtcccccaaccatggaggacgtgtcgtccccgtccccgtcgccgccgcctccccgggcgcccccaaaaaagcggatgaggcggcgtatcgagtccgaggacgaggaagactcatcacaagacgcgctggtgccgcgcacacccagcccgcggccatcgacctcggcggcggatttggccattgcgcccaagaagaaaaagaagcgcccttctcccaagcccgagcgcccgccatcaccagaggtaatcgtggacagcgaggaagaaagagaagatgtggcgctacaaatggtgggtttcagcaacccaccggtgctaatcaagcatggcaaaggaggtaagcgcacagtgcggcggctgaatgaagacgacccagtggcgcgtggtatgcggacgcaagaggaagaggaagagcccagcgaagcggaaagtgaaattacggtgatgaacccgctgagtgtgccgatcgtgtctgcgtgggagaagggcatggaggctgcgcgcgcgctgatggacaagtaccacgtggataacgatctaaaggcgaacttcaaactactgcctgaccaagtggaagctctggcggccgtatgcaagacctggctgaacgaggagcaccgcgggttgcagctgaccttcaccagcaacaagacctttgtgacgatgatggggcgattcctgcaggcgtacctgcagtcgtttgcagaggtgacctacaagcatcacgagcccacgggctgcgcgttgtggctgcaccgctgcgctgagatcgaaggcgagcttaagtgtctacacggaagcattatgataaataaggagcacgtgattgaaatggatgtgacgagcgaaaacgggcagcgcgcgctgaaggagcagtctagcaaggccaagatcgtgaagaaccggtggggccgaaatgtggtgcagatctccaacaccgacgcaaggtgctgcgtgcacgacgcggcctgtccggccaatcagttttccggcaagtcttgcggcatgttcttctctgaaggcgcaaaggctcaggtggcttttaagcagatcaaggcttttatgcaggcgctgtatcctaacgcccagaccgggcacggtcaccttttgatgccactacggtgcgagtgcaactcaaagcctgggcacgcgccctttttgggaaggcagctaccaaagttgactccgttcgccctgagcaacgcggaggacctggacgcggatctgatctccgacaagagcgtgctggccagcgtgcaccacccggcgctgatagtgttccagtgctgcaaccctgtgtatcgcaactcgcgcgcgcagggcggaggccccaactgcgacttcaagatatcggcgcccgacctgctaaacgcgttggtgatggtgcgcagcctgtggagtgaaaacttcaccgagctgccgcggatggttgtgcctgagtttaagtggagcactaaacaccagtatcgcaacgtgtccctgccagtggcgcatagcgatgcgcggcagaacccctttgatttttaaacggcgcagacggcaagggtgggggtaaataatca

SEQ ID NO: 107 - DNA, 5967 bp, synthetic construct
  source 1..5967: mol_type = other DNA
ggatcccatggacgagcccacccttctttatgttttgtttgaagtctttgacgtggtccgtgtgcaccagccgcaccgcggcgtcatcgaaaccgtgtacctgcgcacgcccttctcggccggcaacgccacaacataaagaagcaagcaacatcaacaacagctgccgccatgggctccagtgagcaggaactgaaagccattgtcaaagatcttggttgtgggccatattttttgggcacctatgacaagcgctttccaggctttgtttctccacacaagctcgcctgcgccatagtcaatacggccggtcgcgagactgggggcgtacactggatggcctttgcctggaacccgcactcaaaaacatgctacctctttgagccctttggcttttctgaccagcgactcaagcaggtttaccagtttgagtacgagtcactcctgcgccgtagcgccattgcttcttcccccgaccgctgtataacgctggaaaagtccacccaaagcgtacaggggcccaactcggccgcctgtggactattctgctgcatgtttctccacgcctttgccaactggccccaaactcccatggatcacaaccccaccatgaaccttattaccggggtacccaactccatgctcaacagtccccaggtacagcccaccctgcgtcgcaaccaggaacagctctacagcttcctggagcgccactcgccctacttccgcagccacagtgcgcagattaggagcgccacttctttttgtcacttgaaaaacatgtaaaaataatgtactagagacactttcaataaaggcaaatgcttttatttgtacactctcgggtgattatttacccccacccttgccgtctgcgccgtttaaaaatcaaaggggttctgccgcgcatcgctatgcgccactggcagggacacgttgcgatactggtgtttagtgctccacttaaactcaggcacaaccatccgcggcagctcggtgaagttttcactccacaggctgcgcaccatcaccaacgcgtttagcaggtcgggcgccgatatcttgaagtcgcagttggggcctccgccctgcgcgcgcgagttgcgatacacagggttgcagcactggaacactatcagcgccgggtggtgcacgctggccagcacgctcttgtcggagatcagatccgcgtccaggtcctccgcgttgctcagggcgaacggagtcaactttggtagctgccttcccaaaaagggcgcgtgcccaggctttgagttgcactcgcaccgtagtggcatcaaaaggtgaccgtgcccggtctgggcgttaggatacagcgcctgcataaaagccttgatctgcttaaaagccacctgagcctttgcgccttcagagaagaacatgccgcaagacttgccggaaaactgattggccggacaggccgcgtcgtgcacgcagcaccttgcgtcggtgttggagatctgcaccacatttcggccccaccggttcttcacgatcttggccttgctagactgctccttcagcgcgcgctgcccgttttcgctcgtcacatccatttcaatcacgtgctccttatttatcataatgcttccgtgtagacacttaagctcgccttcgatctcagcgcagcggtgcagccacaacgcgcagcccgtgggctcgtgatgcttgtaggtcacctctgcaaacgactgcaggtacgcctgcaggaatcgccccatcatcgtcacaaaggtcttgttgctggtgaaggtcagctgcaacccgcggtgctcctcgttcagccaggtcttgcatacggccgccagagcttccacttggtcaggcagtagtttgaagttcgcctttagatcgttatccacgtggtacttgtccatcagcgcgcgcgcagcctccatgcccttctcccacgcagacacgatcggcacactcagcgggttcatcaccgtaatttcactttccgcttcgctgggctcttcctcttcctcttgcgtccgcataccacgcgccactgggtcgtcttcattcagccgccgcactgtgcgcttacctcctttgccatgcttgattagcaccggtgggttgctgaaacccaccatttgtagcgccacatcttctctttcttcctcgctgtccacgattacctctggtgatggcgggcgctcgggcttgggagaagggcgcttctttttcttcttgggcgcaatggccaaatccgccgccgaggtcgatggccgcgggctgggtgtgcgcggcaccagcgcgtcttgtgatgagtcttcctcgtcctcggactcgatacgccgcctcatccgcttttttgggggcgcccggggaggcggcggcgacggggacggggacgacacgtcctccatggttgggggacgtcgcgccgcaccgcgtccgcgctcgggggtggtttcgcgctgctcctcttcccgactggccatttccttctcctataggcagaaaaagatcatggagtcagtcgagaagaaggacagcctaaccgccccctctgagttcgccaccaccgcctccaccgatgccgccaacgcgcctaccaccttccccgtcgaggcacccccgcttgaggaggaggaagtgattatcgagcaggacccaggttttgtaagcgaagacgacgaggaccgctcagtaccaacagaggataaaaagcaagaccaggacaacgcagaggcaaacgaggaacaagtcgggcggggggacgaaaggcatggcgactacctagatgtgggagacgacgtgctgttgaagcatctgcagcgccagtgcgccattatctgcgacgcgttgcaagagcgcagcgatgtgcccctcgccatagcggatgtcagccttgcctacgaacgccacctattctcaccgcgcgtaccccccaaacgccaagaaaacggcacatgcgagcccaacccgcgcctcaacttctaccccgtatttgccgtgccagaggtgcttgccacctatcacatctttttccaaaactgcaagatacccctatcctgccgtgccaaccgcagccgagcggacaagcagctggccttgcggcagggcgctgtcatacctgatatcgcctcgctcaacgaagtgccaaaaatctttgagggtcttggacgcgacgagaagcgcgcggcaaacgctctgcaacaggaaaacagcgaaaatgaaagtcactctggagtgttggtggaactcgagggtgacaacgcgcgcctagccgtactaaaacgcagcatcgaggtcacccactttgcctacccggcacttaacctaccccccaaggtcatgagcacagtcatgagtgagctgatcgtgcgccgtgcgcagcccctggagagggatgcaaatttgcaagaacaaacagaggagggcctacccgcagttggcgacgagcagctagcgcgctggcttcaaacgcgcgagcctgccgacttggaggagcgacgcaaactaatgatggccgcagtgctcgttaccgtggagcttgagtgcatgcagcggttctttgctgacccggagatgcagcgcaagctagaggaaacattgcactacacctttcgacagggctacgtacgccaggcctgcaagatctccaacgtggagctctgcaacctggtctcctaccttggaattttgcacgaaaaccgccttgggcaaaacgtgcttcattccacgctcaagggcgaggcgcgccgcgactacgtccgcgactgcgtttacttatttctatgctacacctggcagacggccatgggcgtttggcagcagtgcttggaggagtgcaacctcaaggagctgcagaaactgctaaagcaaaacttgaaggacctatggacggccttcaacgagcgctccgtggccgcgcacctggcggacatcattttccccgaacgcctgcttaaaaccctgcaacagggtctgccagacttcaccagtcaaagcatgttgcagaactttaggaactttatcctagagcgctcaggaatcttgcccgccacctgctgtgcacttcctagcgactttgtgcccattaagtaccgcgaatgccctccgccgctttggggccactgctaccttctgcagctagccaactaccttgcctaccactctgacataatggaagacgtgagcggtgacggtctactggagtgtcactgtcgctgcaacctatgcaccccgcaccgctccctggtttgcaattcgcagctgcttaacgaaagtcaaattatcggtacctttgagctgcagggtccctcgcctgacgaaaagtccgcggctccggggttgaaactcactccggggctgtggacgtcggcttaccttcgcaaatttgtacctgaggactaccacgcccacgagattaggttctacgaagaccaatcccgcccgcctaatgcggagcttaccgcctgcgtcattacccagggccacattcttggccaattgcaagccatcaacaaagcccgccaagagtttctgctacgaaagggacggggggtttacttggacccccagtccggcgaggagctcaacccaatccccccgccgccgcagccctatcagcagcagccgcgggcccttgcttcccaggatggcacccaaaaagaagctgcagctgccgccgccacccacggacgaggaggaatactgggacagtcaggcagaggaggttttggacgaggaggaggaggacatgatggaagactgggagagcctagacgaggaagcttccgaggtcgaagaggtgtcagacgaaacaccgtcaccctcggtcgcattcccctcgccggcgccccagaaatcggcaaccggttccagcatggctacaacctccgctcctcaggcgccgccggcactgcccgttcgccgacccaaccgtagatgggacaccactggaaccagggccggtaagtccaagcagccgccgccgttagcccaagagcaacaacagcgccaaggctaccgctcatggcgcgggcacaagaacgccatagttgcttgcttgcaagactgtgggggcaacatctccttcgcccgccgctttcttctctaccatcacggcgtggccttcccccgtaacatcctgcattactaccgtcatctctacagcccatactgcaccggcggcagcggcagcaacagcagcggccacacagaagcaaaggcgaccggatagcaagactctgacaaagcccaagaaatccacagcggcggcagcagcaggaggaggagcgctgcgtctggcgcccaacgaacccgtatcgacccgcgagcttagaaacaggatttttcccactctgtatgctatatttcaacagagcaggggccaagaacaagagctgaaaataaaaaacaggtctctgcgatccctcacccgcagctgcctgtatcacaaaagcgaagatcagcttcggcgcacgctggaagacgcggaggctctcttcagtaaatactgcgcgctgactcttaaggactagtttcgcgccctttctcaaatttaagcgcgaaaactacgtcatctccagcggccacacccggcgccagcacctgttgtcagcgccattatgagcaaggaaattcccacgccctacatgtggagttaccagccacaaatgggacttgcggctggagctgcccaagactactcaacccgaataaactacatgagcgcgggaccccacatgatatcccgggtcaacggaatacgcgcccaccgaaaccgaattctcctggaacaggcggctattaccaccacacctcgtaataaccttaatccccgtagttggcccgctgccctggtgtaccaggaaagtcccgctcccaccactgtggtacttcccagagacgcccaggccgaagttcagatgactaactcaggggcgcagcttgcgggcggctttcgtcacagggtgcggtcgcccgggc

SEQ ID NO: 108 - DNA, 49 bp, synthetic construct
  source 1..49: mol_type = other DNA
aaataaatatctttattttcattacatctgtgtgttggttttttgtgtg

SEQ ID NO: 109 - DNA, 3764 bp, synthetic construct
  source 1..3764: mol_type = other DNA
gagaatttggttcacctaatgcaccaaacacaaatcccctcaaaacaaaaattggccatggcctagaatttgattcaaacaaggctatggttcctaaactaggaactggccttagttttgacagcacaggtgccattacagtaggaaacaaaaataatgataagctaactttgtggaccacaccagctccatctcctaactgtagactaaatgcagagaaagatgctaaactcactttggtcttaacaaaatgtggcagtcaaatacttgctacagtttcagttttggctgttaaaggcagtttggctccaatatctggaacagttcaaagtgctcatcttattataagatttgacgaaaatggagtgctactaaacaattccttcctggacccagaatattggaactttagaaatggagatcttactgaaggcacagcctatacaaacgctgttggatttatgcctaacctatcagcttatccaaaatctcacggtaaaactgccaaaagtaacattgtcagtcaagtttacttaaacggagacaaaactaaacctgtaacactaaccattacactaaacggtacacaggaaacaggagacacaactccaagtgcatactctatgtcattttcatgggactggtctggccacaactacattaatgaaatatttgccacatcctcttacactttttcatacattgcccaagaataaagaatcgtttgtgttatgtttcaacgtgtttatttttcaattgcagaaaatttcaagtcatttttcattcagtagtatagccccaccaccacatagcttatacagatcaccgtaccttaatcaaactcacagaaccctagtattcaacctgccacctccctcccaacacacagagtacacagtcctttctccccggctggccttaaaaagcatcatatcatgggtaacagacatattcttaggtgttatattccacacggtttcctgtcgagccaaacgctcatcagtgatattaataaactccccgggcagctcacttaagttcatgtcgctgtccagctgctgagccacaggctgctgtccaacttgcggttgcttaacgggcggcgaaggagaagtccacgcctacatgggggtagagtcataatcgtgcatcaggatagggcggtggtgctgcagcagcgcgcgaataaactgctgccgccgccgctccgtcctgcaggaatacaacatggcagtggtctcctcagcgatgattcgcaccgcccgcagcataaggcgccttgtcctccgggcacagcagcgcaccctgatctcacttaaatcagcacagtaactgcagcacagcaccacaatattgttcaaaatcccacagtgcaaggcgctgtatccaaagctcatggcggggaccacagaacccacgtggccatcataccacaagcgcaggtagattaagtggcgacccctcataaacacgctggacataaacattacctcttttggcatgttgtaattcaccacctcccggtaccatataaacctctgattaaacatggcgccatccaccaccatcctaaaccagctggccaaaacctgcccgccggctatacactgcagggaaccgggactggaacaatgacagtggagagcccaggactcgtaaccatggatcatcatgctcgtcatgatatcaatgttggcacaacacaggcacacgtgcatacacttcctcaggattacaagctcctcccgcgttagaaccatatcccagggaacaacccattcctgaatcagcgtaaatcccacactgcagggaagacctcgcacgtaactcacgttgtgcattgtcaaagtgttacattcgggcagcagcggatgatcctccagtatggtagcgcgggtttctgtctcaaaaggaggtagacgatccctactgtacggagtgcgccgagacaaccgagatcgtgttggtcgtagtgtcatgccaaatggaacgccggacgtagtcatatttcctgaagcaaaaccaggtgcgggcgtgacaaacagatctgcgtctccggtctcgccgcttagatcgctctgtgtagtagttgtagtatatccactctctcaaagcatccaggcgccccctggcttcgggttctatgtaaactccttcatgcgccgctgccctgataacatccaccaccgcagaataagccacacccagccaacctacacattcgttctgcgagtcacacacgggaggagcgggaagagctggaagaaccatgtttttttttttattccaaaagattatccaaaacctcaaaatgaagatctattaagtgaacgcgctcccctccggtggcgtggtcaaactctacagccaaagaacagataatggcatttgtaagatgttgcacaatggcttccaaaaggcaaacggccctcacgtccaagtggacgtaaaggctaaacccttcagggtgaatctcctctataaacattccagcaccttcaaccatgcccaaataattctcatctcgccaccttctcaatatatctctaagcaaatcccgaatattaagtccggccattgtaaaaatctgctccagagcgccctccaccttcagcctcaagcagcgaatcatgattgcaaaaattcaggttcctcacagacctgtataagattcaaaagcggaacattaacaaaaataccgcgatcccgtaggtcccttcgcagggccagctgaacataatcgtgcaggtctgcacggaccagcgcggccacttccccgccaggaaccatgacaaaagaacccacactgattatgacacgcatactcggagctatgctaaccagcgtagccccgatgtaagcttgttgcatgggcggcgatataaaatgcaaggtgctgctcaaaaaatcaggcaaagcctcgcgcaaaaaagaaagcacatcgtagtcatgctcatgcagataaaggcaggtaagctccggaaccaccacagaaaaagacaccatttttctctcaaacatgtctgcgggtttctgcataaacacaaaataaaataacaaaaaaacatttaaacattagaagcctgtcttacaacaggaaaaacaacccttataagcataagacggactacggccatgccggcgtgaccgtaaaaaaactggtcaccgtgattaaaaagcaccaccgacagctcctcggtcatgtccggagtcataatgtaagactcggtaaacacatcaggttgattcacatcggtcagtgctaaaaagcgaccgaaatagcccgggggaatacatacccgcaggcgtagagacaacattacagcccccataggaggtataacaaaattaataggagagaaaaacacataaacacctgaaaaaccctcctgcctaggcaaaatagcaccctcccgctccagaacaacatacagcgcttccacagcggcagccataacagtcagccttaccagtaaaaaagaaaacctattaaaaaaacaccactcgacacggcaccagctcaatcagtcacagtgtaaaaaagggccaagtgcagagcgagtatatataggactaaaaaatgacgtaacggttaaagtccacaaaaaacacccagaaaaccgcacgcgaacctacgcccagaaacgaaagccaaaaaacccacaacttcctcaaatcgtcacttccgttttcccacgttacgtaacttcccattttaagaaaactacaattcccaacacatacaagttactccgccctaaaac

SEQ ID NO: 110 - DNA, 5973 bp, synthetic construct
  source 1..5973: mol_type = other DNA
ggatcccatggacgagcccacccttctttatgttttgtttgaagtctttgacgtggtccgtgtgcaccggccgcaccgcggcgtcatcgaaaccgtgtacctgcgcacgcccttctcggccggcaacgccacaacataaagaagcaagcaacatcaacaacagctgccgccatgggctccagtgagcaggaactgaaagccattgtcaaagatcttggttgtgggccatattttttgggcacctatgacaagcgctttccaggctttgtttctccacacaagctcgcctgcgccatagtcaatacggccggtcgcgagactgggggcgtacactggatggcctttgcctggaacccgcactcaaaaacatgctacctctttgagccctttggcttttctgaccagcgactcaagcaggtttaccagtttgagtacgagtcactcctgcgccgtagcgccattgcttcttcccccgaccgctgtataacgctggaaaagtccacccaaagcgtacaggggcccaactcggccgcctgtggactattctgctgcatgtttctccacgcctttgccaactggccccaaactcccatggatcacaaccccaccatgaaccttattaccggggtacccaactccatgctcaacagtccccaggtacagcccaccctgcgtcgcaaccaggaacagctctacagcttcctggagcgccactcgccctacttccgcagccacagtgcgcagattaggagcgccacttctttttgtcacttgaaaaacatgtaaaaataatgtactagagacactttcaataaaggcaaatgcttttatttgtacactctcgggtgattatttacccccacccttgccgtctgcgccgtttaaaaatcaaaggggttctgccgcgcatcgctatgcgccactggcagggacacgttgcgatactggtgtttagtgctccacttaaactcaggcacaaccatccgcggcagctcggtgaagttttcactccacaggctgcgcaccatcaccaacgcgtttagcaggtcgggcgccgatatcttgaagtcgcagttggggcctccgccctgcgcgcgcgagttgcgatacacagggttgcagcactggaacactatcagcgccgggtggtgcacgctggccagcacgctcttgtcggagatcagatccgcgtccaggtcctccgcgttgctcagggcgaacggagtcaactttggtagctgccttcccaaaaagggcgcgtgcccaggctttgagttgcactcgcaccgtagtggcatcaaaaggtgaccgtgcccggtctgggcgttaggatacagcgcctgcataaaagccttgatctgcttaaaagccacctgagcctttgcgccttcagagaagaacatgccgcaagacttgccggaaaactgattggccggacaggccgcgtcgtgcacgcagcaccttgcgtcggtgttggagatctgcaccacatttcggccccaccggttcttcacgatcttggccttgctagactgctccttcagcgcgcgctgcccgttttcgctcgtcacatccatttcaatcacgtgctccttatttatcataatgcttccgtgtagacacttaagctcgccttcgatctcagcgcagcggtgcagccacaacgcgcagcccgtgggctcgtgatgcttgtaggtcacctctgcaaacgactgcaggtacgcctgcaggaatcgccccatcatcgtcacaaaggtcttgttgctggtgaaggtcagctgcaacccgcggtgctcctcgttcagccaggtcttgcatacggccgccagagcttccacttggtcaggcagtagtttgaagttcgcctttagatcgttatccacgtggtacttgtccatcagcgcgcgcgcagcctccatgcccttctcccacgcagacacgatcggcacactcagcgggttcatcaccgtaatttcactttccgcttcgctgggctcttcctcttcctcttgcgtccgcataccacgcgccactgggtcgtcttcattcagccgccgcactgtgcgcttacctcctttgccatgcttgattagcaccggtgggttgctgaaacccaccatttgtagcgccacatcttctctttcttcctcgctgtccacgattacctctggtgatggcgggcgctcgggcttgggagaagggcgcttctttttcttcttgggcgcaatggccaaatccgccgccgaggtcgatggccgcgggctgggtgtgcgcggcaccagcgcgtcttgtgatgagtcttcctcgtcctcggactcgatacgccgcctcatccgcttttttgggggcgcccggggaggcggcggcgacggggacggggacgacacgtcctccatggttgggggacgtcgcgccgcaccgcgtccgcgctcgggggtggtttcgcgctgctcctcttcccgactggccatttccttctcctataggcagaaaaagatcatggagtcagtcgagaagaaggacagcctaaccgccccctctgagttcgccaccaccgcctccaccgatgccgccaacgcgcctaccaccttccccgtcgaggcacccccgcttgaggaggaggaagtgattatcgagcaggacccaggttttgtaagcgaagacgacgaggaccgctcagtaccaacagaggataaaaagcaagaccaggacaacgcagaggcaaacgaggaacaagtcgggcggggggacgaaaggcatggcgactacctagatgtgggagacgacgtgctgttgaagcatctgcagcgccagtgcgccattatctgcgacgcgttgcaagagcgcagcgatgtgcccctcgccatagcggatgtcagccttgcctacgaacgccacctattctcaccgcgcgtaccccccaaacgccaagaaaacggcacatgcgagcccaacccgcgcctcaacttctaccccgtatttgccgtgccagaggtgcttgccacctatcacatctttttccaaaactgcaagatacccctatcctgccgtgccaaccgcagccgagcggacaagcagctggccttgcggcagggcgctgtcatacctgatatcgcctcgctcaacgaagtgccaaaaatctttgagggtcttggacgcgacgagaagcgcgcggcaaacgctctgcaacaggaaaacagcgaaaatgaaagtcactctggagtgttggtggaactcgagggtgacaacgcgcgcctagccgtactaaaacgcagcatcgaggtcacccactttgcctacccggcacttaacctaccccccaaggtcatgagcacagtcatgagtgagctgatcgtgcgccgtgcgcagcccctggagagggatgcaaatttgcaagaacaaacagaggagggcctacccgcagttggcgacgagcagctagcgcgctggcttcaaacgcgcgagcctgccgacttggaggagcgacgcaaactaatgatggccgcagtgctcgttaccgtggagcttgagtgcatgcagcggttctttgctgacccggagatgcagcgcaagctagaggaaacattgcactacacctttcgacagggctacgtacgccaggcctgcaagatctccaacgtggagctctgcaacctggtctcctaccttggaattttgcacgaaaaccgccttgggcaaaacgtgcttcattccacgctcaagggcgaggcgcgccgcgactacgtccgcgactgcgtttacttatttctatgctacacctggcagacggccatgggcgtttggcagcagtgcttggaggagtgcaacctcaaggagctgcagaaactgctaaagcaaaacttgaaggacctatggacggccttcaacgagcgctccgtggccgcgcacctggcggacatcattttccccgaacgcctgcttaaaaccctgcaacagggtctgccagacttcaccagtcaaagcatgttgcagaactttaggaactttatcctagagcgctcaggaatcttgcccgccacctgctgtgcacttcctagcgactttgtgcccattaagtaccgcgaatgccctccgccgctttggggccactgctaccttctgcagctagccaactaccttgcctaccactctgacataatggaagacgtgagcggtgacggtctactggagtgtcactgtcgctgcaacctatgcaccccgcaccgctccctggtttgcaattcgcagctgcttaacgaaagtcaaattatcggtacctttgagctgcagggtccctcgcctgacgaaaagtccgcggctccggggttgaaactcactccggggctgtggacgtcggcttaccttcgcaaatttgtacctgaggactaccacgcccacgagattaggttctacgaagaccaatcccgcccgccaaatgcggagcttaccgcctgcgtcattacccagggccacattcttggccaattgcaagccatcaacaaagcccgccaagagtttctgctacgaaagggacggggggtttacttggacccccagtccggcgaggagctcaacccaatccccccgccgccgcagccctatcagcagcagccgcgggcccttgcttcccaggatggcacccaaaaagaagctgcagctgccgccgccacccacggacgaggaggaatactgggacagtcaggcagaggaggttttggacgaggaggaggaggacatgatggaagactgggagagcctagacgaggaagcttccgaggtcgaagaggtgtcagacgaaacaccgtcaccctcggtcgcattcccctcgccggcgccccagaaatcggcaaccggttccagcatggctacaacctccgctcctcaggcgccgccggcactgcccgttcgccgacccaaccgtagatgggacaccactggaaccagggccggtaagtccaagcagccgccgccgttagcccaagagcaacaacagcgccaaggctaccgctcatggcgcgggcacaagaacgccatagttgcttgcttgcaagactgtgggggcaacatctccttcgcccgccgctttcttctctaccatcacggcgtggccttcccccgtaacatcctgcattactaccgtcatctctacagcccatactgcaccggcggcagcggcagcggcagcaacagcagcggccacacagaagcaaaggcgaccggatagcaagactctgacaaagcccaagaaatccacagcggcggcagcagcaggaggaggagcgctgcgtctggcgcccaacgaacccgtatcgacccgcgagcttagaaacaggatttttcccactctgtatgctatatttcaacagagcaggggccaagaacaagagctgaaaataaaaaacaggtctctgcgatccctcacccgcagctgcctgtatcacaaaagcgaagatcagcttcggcgcacgctggaagacgcggaggctctcttcagtaaatactgcgcgctgactcttaaggactagtttcgcgccctttctcaaatttaagcgcgaaaactacgtcatctccagcggccacacccggcgccagcacctgtcgtcagcgccattatgagcaaggaaattcccacgccctacatgtggagttaccagccacaaatgggacttgcggctggagctgcccaagactactcaacccgaataaactacatgagcgcgggaccccacatgatatcccgggtcaacggaatccgcgcccaccgaaaccgaattctcttggaacaggcggctattaccaccacacctcgtaataaccttaatccccgtagttggcccgctgccctggtgtaccaggaaagtcccgctcccaccactgtggtacttcccagagacgcccaggccgaagttcagatgactaactcaggggcgcagcttgcgggcggctttcgtcacagggtgcggtcgcccgggc

SEQ ID NO: 111 - DNA, 1728 bp, synthetic construct
  source 1..1728: mol_type = other DNA
tcgacagaagcaccatgtccttgggtccggcctgctgaatgcgcaggcggtcggccatgccccaggcttcgttttgacatcggcgcaggtctttgtagtagtcttgcatgagcctttctaccggcacttcttcttctccttcctcttgtcctgcatctcttgcatctatcgctgcggcggcggcggagtttggccgtaggtggcgccctcttcctcccatgcgtgtgaccccgaagcccctcatcggctgaagcagggctaggtcggcgacaacgcgctcggctaatatggcctgctgcacctgcgtgagggtagactggaagtcatccatgtccacaaagcggtggtatgcgcccgtgttgatggtgtaagtgcagttggccataacggaccagttaacggtctggtgacccggctgcgagagctcggtgtacctgagacgcgagtaagccctcgagtcaaatacgtagtcgttgcaagtccgcaccaggtactggtatcccaccaaaaagtgcggcggcggctggcggtagaggggccagcgtagggtggccggggctccgggggcgagatcttccaacataaggcgatgatatccgtagatgtacctggacatccaggtgatgccggcggcggtggtggaggcgcgcggaaagtcgcggacgcggttccagatgttgcgcagcggcaaaaagtgctccatggtcgggacgctctggccggtcaggcgcgcgcaatcgttgacgctctagaccgtgcaaaaggagagcctgtaagcgggcactcttccgtggtctggtggataaattcgcaagggtatcatggcggacgaccggggttcgagccccgtatccggccgtccgccgtgatccatgcggttaccgcccgcgtgtcgaacccaggtgtgcgacgtcagacaacgggggagtgctccttttggcttccttccaggcgcggcggctgctgcgctagcttttttggccactggccgcgcgcagcgtaagcggttaggctggaaagcgaaagcattaagtggctcgctccctgtagccggagggttattttccaagggttgagtcgcgggacccccggttcgagtctcggaccggccggactgcggcgaacgggggtttgcctccccgtcatgcaagaccccgcttgcaaattcctccggaaacagggacgagccccttttttgcttttcccagatgcatccggtgctgcggcagatgcgcccccctcctcagcagcggcaagagcaagagcagcggcagacatgcagggcaccctcccctcctcctaccgcgtcaggaggggcgacatccgcggttgacgcggcagcagatggtgattacgaacccccgcggcgccgggcccggcactacctggacttggaggagggcgagggcctggcgcggctaggagcgccctctcctgagcggtacccaagggtgcagctgaagcgtgatacgcgtgaggcgtacgtgccgcggcagaacctgtttcgcgaccgcgagggagaggagcccgaggagatgcgggatcgaaagttccacgcagggcgcgagctgcggcatggcctgaatcgcgagcggttgctgcgcgaggaggactttgagcccgacgcgcgaaccgggattagtcccgcgcgcgcacacgtggcggccgccgacctggtaaccgcatacgagcagacggtgaaccaggagattaactttcaaaaaagct

SEQ ID NO: 112 - DNA, 5973 bp, synthetic construct; identical to SEQ ID NO: 110
  source 1..5973: mol_type = other DNA

SEQ ID NO: 113 - DNA, 9978 bp, synthetic construct
  source 1..9978: mol_type = other DNA
tgcagctctggcccgtgtctcaaaatctctgatgttacattgcacaagataaaaatatatcatcatgaacaataaaactgtctgcttacataaacagtaatacaaggggtgttatgagccatattcaacgggaaacgtcgaggccgcgattaaattccaacatggatgctgatttatatgggtataaatgggctcgcgataatgtcgggcaatcaggtgcgacaatctatcgcttgtatgggaagcccgatgcgccagagttgtttctgaaacatggcaaaggtagcgttgccaatgatgttacagatgagatggtcagactaaactggctgacggaatttatgcctcttccgaccatcaagcattttatccgtactcctgatgatgcatggttactcaccactgcgatccccggaaaaacagcattccaggtattagaagaatatcctgattcaggtgaaaatattgttgatgcgctggcagtgttcctgcgccggttgcattcgattcctgtttgtaattgtccttttaacagcgatcgcgtatttcgtctcgctcaggcgcaatcacgaatgaataacggtttggttgatgcgagtgattttgatgacgagcgtaatggctggcctgttgaacaagtctggaaagaaatgcataaacttttgccattctcaccggattcagtcgtcactcatggtgatttctcacttgataaccttatttttgacgaggggaaattaataggttgtattgatgttggacgagtcggaatcgcagaccgataccaggatcttgccatcctatggaactgcctcggtgagttttctccttcattacagaaacggctttttcaaaaatatggtattgataatcctgatatgaataaattgcagtttcatttgatgctcgatgagtttttctaatcagaattggttaattggttgtaacattattcagattgggcttgatttaaaacttcatttttaatttaaaaggatctaggtgaagatcctttttgataatctcatgaccaaaatcccttaacgtgagttttcgttccactgagcgtcagaccccgtagaaaagatcaaaggatcttcttgagatcctttttttctgcgcgtaatctgctgcttgcaaacaaaaaaaccaccgctaccagcggtggtttgtttgccggatcaagagctaccaactctttttccgaaggtaactggcttcagcagagcgcagataccaaatactgttcttctagtgtagccgtagttaggccaccacttcaagaactctgtagcaccgcctacatacctcgctctgctaatcctgttaccagtggctgctgccagtggcgataagtcgtgtcttaccgggttggactcaagacgatagttaccggataaggcgcagcggtcgggctgaacggggggttcgtgcacacagcccagcttggagcgaacgacctacaccgaactgagatacctacagcgtgagctatgagaaagcgccacgcttcccgaagggagaaaggcggacaggtatccggtaagcggcagggtcggaacaggagagcgcacgagggagcttccagggggaaacgcctggtatctttatagtcctgtcgggtttcgccacctctgacttgagcgtcgatttttgtgatgctcgtcaggggggcggagcctatggaaaaacgccagcaacgcggcctttttacggttcctggccttttgctggccttttgctcacatgttctttcctgcgttatcccctgattctgtggataaccgtattaccgcctttgagtgagctgataccgctcgccgcagccgaacgaccgagcgcagcgagtcagtgagcgaggaagcggaagagcgcccaatacgcaaaccgcctctccccgcgcgttggccgattcattaatgcagctggcacgacaggtttcccgactggaaagcgggcagtgagcgcaacgcaattaatgtgagttagctcactcattaggcaccccaggctttacactttatgcttccggctcgtatgttgtgtggaattgtgagcggataacaatttcacacaggaaacagctatgaccatgattacaccaagcttgcatgcaggcctatccgtagatgtacctggacatccaggtgatgccggcggcggtggtggaggcgcgcggaaagtcgcggacgcggttccagatgttgcgcagcggcaaaaagtgctccatggtcgggacgctctggccggtgaggcgtgcgcagtcgttgacgctctagaccgtgcaaaaggagagcctgtaagcgggcactcttccgtggtctggtggataaattcgcaagggtatcatggcggacgaccggggttcgaaccccggatccggccgtccgccgtgatccatgcggttaccgcccgcgtgtcgaacccaggtgtgcgacgtcagacaacgggggagcgctccttttggcttccttccaggcgcggcggctgctgcgctagcttttttggccactggccgcgcgcggcgtaagcggttaggctggaaagcgaaagcattaagtggctcgctccctgtagccggagggttattttccaagggttgagtcgcaggacccccggttcgagtctcgggccggccggactgcggcgaacgggggtttgcctccccgtcatgcaagaccccgcttgcaaattcctccggaaacagggacgagccccttttttgcttttcccagatgcatccggtgctgcggcagatgcgcccccctcctcagcagcggcaagagcaagagcagcggcagacatgcagggcaccctccccttctcctaccgcgtcaggaggggcaacatcgatccagacatgataagatacattgatgagtttggacaaaccacaactagaatgcagtgaaaaaaatgctttatttgtgaaatttgtgatgctattgctttatttgtaaccattataagctgcaataaacaagtttgtacactctcgggtgattatttacccccacccttgccgtctgcgccgtttaaaaatcaaaggggttctgccgcgcatcgctatgcgccactggcagggacacgttgcgatactggtgtttagtgctccacttaaactcaggcacaaccatccgcggcagctcggtgaagttttcactccacaggctgcgcaccatcaccaacgcgtttagcaggtcgggcgccgatatcttgaagtcgcagttggggcctccgccctgcgcgcgcgagttgcgatacacagggttgcagcactggaacactatcagcgccgggtggtgcacgctggccagcacgctcttgtcggagatcagatccgcgtccaggtcctccgcgttgctcagggcgaacggagtcaactttggtagctgccttcccaaaaagggcgcgtgcccaggctttgagttgcactcgcaccgtagtggcatcaaaaggtgaccgtgcccggtctgggcgttaggatacagcgcctgcataaaagccttgatctgcttaaaagccacctgagcctttgcgccttcagagaagaacatgccgcaagacttgccggaaaactgattggccggacaggccgcgtcgtgcacgcagcaccttgcgtcggtgttggagatctgcaccacatttcggccccaccggttcttcacgatcttggccttgctagactgctccttcagcgcgcgctgcccgttttcgctcgtcacatccatttcaatcacgtgctccttatttatcataatgcttccgtgtagacacttaagctcgccttcgatctcagcgcagcggtgcagccacaacgcgcagcccgtgggctcgtgatgcttgtaggtcacctctgcaaacgactgcaggtacgcctgcaggaatcgccccatcatcgtcacaaaggtcttgttgctggtgaaggtcagctgcaacccgcggtgctcctcgttcagccaggtcttgcatacggccgccagagcttccacttggtcaggcagtagtttgaagttcgcctttagatcgttatccacgtggtacttgtccatcagcgcgcgcgcagcctccatgcccttctcccacgcagacacgatcggcacactcagcgggttcatcaccgtaatttcactttccgcttcgctgggctcttcctcttcctcttgcgtccgcataccacgcgccactgggtcgtcttcattcagccgccgcactgtgcgcttacctcctttgccatgcttgattagcaccggtgggttgctgaaacccaccatttgtagcgccacatcttctctttcttcctcgctgtccacgattacctctggtgatggcgggcgctcgggcttgggagaagggcgcttctttttcttcttgggcgcaatggccaaatccgccgccgaggtcgatggccgcgggctgggtgtgcgcggcaccagcgcgtcttgtgatgagtcttcctcgtcctcggactcgatacgccgcctcatccgcttttttgggggcgcccggggaggcggcggcgacggggacggggacgacacgtcctccatggttgggggacgtcgcgccgcaccgcgtccgcgctcgggggtggtttcgcgctgctcctcttcccgactggccatttccttctcctataggcagaaaaagatccacaaaagcgaagatcagcttcggcgcacgctggaagacgcggaggctctcttcagtaaatactgcgcgctgactcttaaggactagtttcgcgccctttctcaaatttaagcgcgaaaactacgtcatctccagcggccacacccggcgccagcacctgttgtcagcgccattggcgcgcccgcccgccgcgcgcttcgctttttatagggccgccgccgccgccgcctcgccataaaaggaaactttcggagcgcgccgctctgattggctgccgccgcacctctccgcctcgccccgccccgcccctcgccccgccccgccccgcctggcgcgcgccccccccccccccccgcccccatcgctgcacaaaataattaaaaaataaataaatacaaaattgggggtggggaggggggggagatggggagagtgaagcagaacgtggggctcacctcgaggccggccgaatatcttcatttcacgcccacgagattaggttctacgaagaccaatcccgcccgcctaatgcggagcttaccgcctgcgtcattacccagggccacattcttggccaattgcaagccatcaacaaagcccgccaagagtttctgctacgaaagggacggggggtttacttggacccccagtccggcgaggagctcaacccaatccccccgccgccgcagccctatcagcagcagccgcgggcccttgcttcccaggatggcacccaaaaagaagctgcagctgccgccgccacccacggacgaggaggaatactgggacagtcaggcagaggaggttttggacgaggaggaggaggacatgatggaagactgggagagcctagacgaggaagcttccgaggtcgaagaggtgtcagacgaaacaccgtcaccctcggtcgcattcccctcgccggcgccccagaaatcggcaaccggttccagcatggctacaacctccgctcctcaggcgccgccggcactgcccgttcgccgacccaaccgtagatgggacaccactggaaccagggccggtaagtccaagcagccgccgccgttagcccaagagcaacaacagcgccaaggctaccgctcatggcgcgggcacaagaacgccatagttgcttgcttgcaagactgtgggggcaacatctccttcgcccgccgctttcttctctaccatcacggcgtggccttcccccgtaacatcctgcattactaccgtcatctctacagcccatactgcaccggcggcagcggcagcaacagcagcggccacacagaagcaaaggcgaccggatagcaagactctgacaaagcccaagaaatccacagcggcggcagcagcaggaggaggagcgctgcgtctggcgcccaacgaacccgtatcgacccgcgagcttagaaacaggatttttcccactctgtatgctatatttcaacagagcaggggccaagaacaagagctgaaaataaaaaacaggtctctgcgatccctcacccgcagctgcctgtatcacaaaagcgaagatcagcttcggcgcacgctggaagacgcggaggctctcttcagtaaatactgcgcgctgactcttaaggactagtttcgcgccctttctcaaatttaagcgcgaaaactacgtcatctccagcggccacacccggcgccagcacctgttgtcagcgccattatgagcaaggaaattcccacgccctacatgtggagttaccagccacaaatgggacttgcggctggagctgcccaagactactcaacccgaataaactacatgagcgcggggcaaatgtttaaacatcgatgcggccgccgtttgtgttatgtttcaacgtgtttatttttcaattgcagaaaatttcaagtcatttttcattcagtagtatagccccaccaccacatagcttatacagatcaccgtaccttaatcaaactcacagaaccctagtattcaacctgccacctccctcccaacacacagagtacacagtcctttctccccggctggccttaaaaagcatcatatcatgggtaacagacatattcttaggtgttatattccacacggtttcctgtcgagccaaacgctcatcagtgatattaataaactccccgggcagctcacttaagttcatgtcgctgtccagctgctgagccacaggctgctgtccaacttgcggttgcttaacgggcggcgaaggagaagtccacgcctacatgggggtagagtcataatcgtgcatcaggatagggcggtggtgctgcagcagcgcgcgaataaactgctgccgccgccgctccgtcctgcaggaatacaacatggcagtggtctcctcagcgatgattcgcaccgcccgcagcataaggcgccttgtcctccgggcacagcagcgcaccctgatctcacttaaatcagcacagtaactgcagcacagcaccacaatattgttcaaaatcccacagtgcaaggcgctgtatccaaagctcatggcggggaccacagaacccacgtggccatcataccacaagcgcaggtagattaagtggcgacccctcataaacacgctggacataaacattacctcttttggcatgttgtaattcaccacctcccggtaccatataaacctctgattaaacatggcgccatccaccaccatcctaaaccagctggccaaaacctgcccgccggctatacactgcagggaaccgggactggaacaatgacagtggagagcccaggactcgtaaccatggatcatcatgctcgtcatgatatcaatgttggcacaacacaggcacacgtgcatacacttcctcaggattacaagctcctcccgcgttagaaccatatcccagggaacaacccattcctgaatcagcgtaaatcccacactgcagggaagacctcgcacgtaactcacgttgtgcattgtcaaagtgttacattcgggcagcagcggatgatcctccagtatggtagcgcgggtttctgtctcaaaaggaggtagacgatccctactgtacggagtgcgccgagacaaccgagatcgtgttggtcgtagtgtcatgccaaatggaacgccggacgtagtcatatttcctgaagcaaaaccaggtgcgggcgtgacaaacagatctgcgtctccggtctcgccgcttagatcgctctgtgtagtagttgtagtatatccactctctcaaagcatccaggcgccccctggcttcgggttctatgtaaactccttcatgcgccgctgccctgataacatccaccaccgcagaataagccacacccagccaacctacacattcgttctgcgagtcacacacgggaggagcgggaagagctggaagaaccatgtttttttttttattccaaaagattatccaaaacctcaaaatgaagatctattaagtgaacgcgctcccctccggtggcgtggtcaaactctacagccaaagaacagataatggcatttgtaagatgttgcacaatggcttccaaaaggcaaacggccctcacgtccaagtggacgtaaaggctaaacccttcagggtgaatctcctctataaacattccagcaccttcaaccatgcccaaataattctcatctcgccaccttctcaatatatctctaagcaaatcccgaatattaagtccggccattgtaaaaatctgctccagagcgccctccaccttcagcctcaagcagcgaatcatgattgcaaaaattcaggttcctcacagacctgtataagattcaaaagcggaacattaacaaaaataccgcgatcccgtaggtcccttcgcagggccagctgaacataatcgtgcaggtctgcacggaccagcgcggccacttccccgccaggaaccatgacaaaagaacccacactgattatgacacgcatactcggagctatgctaaccagcgtagccccgatgtaagcttgttgcatgggcggcgatataaaatgcaaggtgctgctcaaaaaatcaggcaaagcctcgcgcaaaaaagaaagcacatcgtagtcatgctcatgcagataaaggcaggtaagctccggaaccaccacagaaaaagacaccatttttctctcaaacatgtctgcgggtttctgcataaacacaaaataaaataacaaaaaaacatttaaacattagaagcctgtcttacaacaggaaaaacaacccttataagcataagacggactacggccatgccggcgtgaccgtaaaaaaactggtcaccgtgattaaaaagcaccaccgacagctcctcggtcatgtccggagtcataatgtaagactcggtaaacacatcaggttgattcacatcggtcagtgctaaaaagcgaccgaaatagcccgggggaatacatacccgcaggcgtagagacaacattacagcccccataggaggtataacaaaattaataggagagaaaaacacataaacacctgaaaaaccctcctgcctaggcaaaatagcaccctcccgctccagaacaacatacagcgcttccacagcggcagccataacagtcagccttaccagtaaaaaagaaaacctattaaaaaaacaccactcgacacggcaccagctcaatcagtcacagtgtaaaaaagggccaagtgcagagcgagtatatataggactaaaaaatgacgtaacggttaaagtccacaaaaaacacccagaaaaccgcacgcgaacctacgcccagaaacgaaagccaaaaaacccacaacttcctcaaatcgtcacttccgttttcccacgttacgtcacttcccattttaagaaaactacaattcccaacacatacaagttactccgcccttaattaaatcggatccgatatctagatgtattcgcgaggtaccgagctcgaattctctggccgtcgttttacaacgtcgtgactgggaaaaccctggcgttacccaacttaatcgccttgcagcacatccccctttcgccagctggcgtaatagcgaagaggcccgcaccgatcgcccttcccaacagttgcgcagcctgaatggcgaatggcgcctgatgcggtattttctccttacgcatctgtgcggtatttcacaccgcatatggtgcactctcagtacaatctgctctgatgccgcatagttaagccagccccgacacccgccaacacccgctgacgcgccctgacgggcttgtctgctcccggcatccgcttacagacaagctgtgaccgtctccgggagctgcatgtgtcagaggttttcaccgtcatcaccgaaacgcgcga

SEQ ID NO: 114 - DNA, 9825 bp, synthetic construct
  source 1..9825: mol_type = other DNA
tgcagctctggcccgtgtctcaaaatctctgatgttacattgcacaagataaaaatatatcatcatgaacaataaaactgtctgcttacataaacagtaatacaaggggtgttatgagccatattcaacgggaaacgtcgaggccgcgattaaattccaacatggatgctgatttatatgggtataaatgggctcgcgataatgtcgggcaatcaggtgcgacaatctatcgcttgtatgggaagcccgatgcgccagagttgtttctgaaacatggcaaaggtagcgttgccaatgatgttacagatgagatggtcagactaaactggctgacggaatttatgcctcttccgaccatcaagcattttatccgtactcctgatgatgcatggttactcaccactgcgatccccggaaaaacagcattccaggtattagaagaatatcctgattcaggtgaaaatattgttgatgcgctggcagtgttcctgcgccggttgcattcgattcctgtttgtaattgtccttttaacagcgatcgcgtatttcgtctcgctcaggcgcaatcacgaatgaataacggtttggttgatgcgagtgattttgatgacgagcgtaatggctggcctgttgaacaagtctggaaagaaatgcataaacttttgccattctcaccggattcagtcgtcactcatggtgatttctcacttgataaccttatttttgacgaggggaaattaataggttgtattgatgttggacgagtcggaatcgcagaccgataccaggatcttgccatcctatggaactgcctcggtgagttttctccttcattacagaaacggctttttcaaaaatatggtattgataatcctgatatgaataaattgcagtttcatttgatgctcgatgagtttttctaatcagaattggttaattggttgtaacattattcagattgggcttgatttaaaacttcatttttaatttaaaaggatctaggtgaagatcctttttgataatctcatgaccaaaatcccttaacgtgagttttcgttccactgagcgtcagaccccgtagaaaagatcaaaggatcttcttgagatcctttttttctgcgcgtaatctgctgcttgcaaacaaaaaaaccaccgctaccagcggtggtttgtttgccggatcaagagctaccaactctttttccgaaggtaactggcttcagcagagcgcagataccaaatactgttcttctagtgtagccgtagttaggccaccacttcaagaactctgtagcaccgcctacatacctcgctctgctaatcctgttaccagtggctgctgccagtggcgataagtcgtgtcttaccgggttggactcaagacgatagttaccggataaggcgcagcggtcgggctgaacggggggttcgtgcacacagcccagcttggagcgaacgacctacaccgaactgagatacctacagcgtgagctatgagaaagcgccacgcttcccgaagggagaaaggcggacaggtatccggtaagcggcagggtcggaacaggagagcgcacgagggagcttccagggggaaacgcctggtatctttatagtcctgtcgggtttcgccacctctgacttgagcgtcgatttttgtgatgctcgtcaggggggcggagcctatggaaaaacgccagcaacgcggcctttttacggttcctggccttttgctggccttttgctcacatgttctttcctgcgttatcccctgattctgtggataaccgtattaccgcctttgagtgagctgataccgctcgccgcagccgaacgaccgagcgcagcgagtcagtgagcgaggaagcggaagagcgcccaatacgcaaaccgcctctccccgcgcgttggccgattcattaatgcagctggcacgacaggtttcccgactggaaagcgggcagtgagcgcaacgcaattaatgtgagttagctcactcattaggcaccccaggctttacactttatgcttccggctcgtatgttgtgtggaattgtgagcggataacaatttcacacaggaaacagctatgaccatgattacaccaagcttgcatgcaggcctatccgtagatgtacctggacatccaggtgatgccggcggcggtggtggaggcgcgcggaaagtcgcggacgcggttccagatgttgcgcagcggcaaaaagtgctccatggtcgggacgctctggccggtgaggcgtgcgcagtcgttgacgctctagaccgtgcaaaaggagagcctgtaagcgggcactcttccgtggtctggtggataaattcgcaagggtatcatggcggacgaccggggttcgaaccccggatccggccgtccgccgtgatccatgcggttaccgcccgcgtgtcgaacccaggtgtgcgacgtcagacaacgggggagcgctccttttggcttccttccaggcgcggcggctgctgcgctagcttttttggccactggccgcgcgcggcgtaagcggttaggctggaaagcgaaagcattaagtggctcgctccctgtagccggagggttattttccaagggttgagtcgcaggacccccggttcgagtctcgggccggccggactgcggcgaacgggggtttgcctccccgtcatgcaagaccccgcttgcaaattcctccggaaacagggacgagccccttttttgcttttcccagatgcatccggtgctgcggcagatgcgcccccctcctcagcagcggcaagagcaagagcagcggcagacatgcagggcaccctccccttctcctaccgcgtcaggaggggcaacatcgatccagacatgataagatacattgatgagtttggacaaaccacaactagaatgcagtgaaaaaaatgctttatttgtgaaatttgtgatgctattgctttatttgtaaccattataagctgcaataaacaagtttgtacactctcgggtgattatttacccccacccttgccgtctgcgccgtttaaaaatcaaaggggttctgccgcgcatcgctatgcgccactggcagggacacgttgcgatactggtgtttagtgctccacttaaactcaggcacaaccatccgcggcagctcggtgaagttttcactccacaggctgcgcaccatcaccaacgcgtttagcaggtcgggcgccgatatcttgaagtcgcagttggggcctccgccctgcgcgcgcgagttgcgatacacagggttgcagcactggaacactatcagcgccgggtggtgcacgctggccagcacgctcttgtcggagatcagatccgcgtccaggtcctccgcgttgctcagggcgaacggagtcaactttggtagctgccttcccaaaaagggcgcgtgcccaggctttgagttgcactcgcaccgtagtggcatcaaaaggtgaccgtgcccggtctgggcgttaggatacagcgcctgcataaaagccttgatctgcttaaaagccacctgagcctttgcgccttcagagaagaacatgccgcaagacttgccggaaaactgattggccggacaggccgcgtcgtgcacgcagcaccttgcgtcggtgttggagatctgcaccacatttcggccccaccggttcttcacgatcttggccttgctagactgctccttcagcgcgcgctgcccgttttcgctcgtcacatccatttcaatcacgtgctccttatttatcataatgcttccgtgtagacacttaagctcgccttcgatctcagcgcagcggtgcagccacaacgcgcagcccgtgggctcgtgatgcttgtaggtcacctctgcaaacgactgcaggtacgcctgcaggaatcgccccatcatcgtcacaaaggtcttgttgctggtgaaggtcagctgcaacccgcggtgctcctcgttcagccaggtcttgcatacggccgccagagcttccacttggtcaggcagtagtttgaagttcgcctttagatcgttatccacgtggtacttgtccatcagcgcgcgcgcagcctccatgcccttctcccacgcagacacgatcggcacactcagcgggttcatcaccgtaatttcactttccgcttcgctgggctcttcctcttcctcttgcgtccgcataccacgcgccactgggtcgtcttcattcagccgccgcactgtgcgcttacctcctttgccatgcttgattagcaccggtgggttgctgaaacccaccatttgtagcgccacatcttctctttcttcctcgctgtccacgattacctctggtgatggcgggcgctcgggcttgggagaagggcgcttctttttcttcttgggcgcaatggccaaatccgccgccgaggtcgatggccgcgggctgggtgtgcgcggcaccagcgcgtcttgtgatgagtcttcctcgtcctcggactcgatacgccgcctcatccgcttttttgggggcgcccggggaggcggcggcgacggggacggggacgacacgtcctccatggttgggggacgtcgcgccgcaccgcgtccgcgctcgggggtggtttcgcgctgctcctcttcccgactggccatttccttctcctataggcagaaaaagatccacaaaagcgaagatcagcttcggcgcacgctggaagacgcggaggctctcttcagtaaatactgcgcgctgactcttaaggactagtttcgcgccctttctcaaatttaagcgcgaaaactacgtcatctccagcggccacacccggcgccagcacctgttgtcagcgccattggcgcgcccgcccgccgcgcgcttcgctttttatagggccgccgccgccgccgcctcgccataaaaggaaactttcggagcgcgccgctctgattggctgccgccgcacctctccgcctcgccccgccccgcccctcgccccgccccgccccgcctggcgcgcgccccccccccccccccgcccccatcgctgcacaaaataattaaaaaataaataaatacaaaattgggggtggggaggggggggagatggggagagtgaagcagaacgtggggctcacctcgaggccggccgaatatcttcatttaaatgtttaaacatcgatgcggccgcgattaggttctacgaagaccaatcccgcccgcctaatgcggagcttaccgcctgcgtcattacccagggccacattcttggccaattgcaagccatcaacaaagcccgccaagagtttctgctacgaaagggacggggggtttacttggacccccagtccggcgaggagctcaacccaatccccccgccgccgcagccctatcagcagcagccgcgggcccttgcttcccaggatggcacccaaaaagaagctgcagctgccgccgccacccacggacgaggaggaatactgggacagtcaggcagaggaggttttggacgaggaggaggaggacatgatggaagactgggagagcctagacgaggaagcttccgaggtcgaagaggtgtcagacgaaacaccgtcaccctcggtcgcattcccctcgccggcgccccagaaatcggcaaccggttccagcatggctacaacctccgctcctcaggcgccgccggcactgcccgttcgccgacccaaccgtagatgggacaccactggaaccagggccggtaagtccaagcagccgccgccgttagcccaagagcaacaacagcgccaaggctaccgctcatggcgcgggcacaagaacgccatagttgcttgcttgcaagactgtgggggcaacatctccttcgcccgccgctttcttctctaccatcacggcgtggccttcccccgtaacatcctgcattactaccgtcatctctacagcccatactgcaccggcggcagcggcagcaacagcagcggccacacagaagcaaaggcgaccggatagcaagactctgacaaagcccaagaaatccacagcggcggcagcagcaggaggaggagcgctgcgtctggcgcccaacgaacccgtatcgacccgcgagcttagaaacaggatttttcccactctgtatgctatatttcaacagagcaggggccaagaacaagagctgaaaataaaaaacaggtctctgcgatccctcacccgcagctgcctgtatcacaaaagcgaagatcagcttcggcgcacgctggaagacgcggaggctctcttcagtaaatactgcgcgctgactcttaaggactagaataaaagatctttattttcattagatctgtgtgttggttttttgtgtggcggccgccgtttgtgttatgtttcaacgtgtttatttttcaattgcagaaaatttcaagtcatttttcattcagtagtatagccccaccaccacatagcttatacagatcaccgtaccttaatcaaactcacagaaccctagtattcaacctgccacctccctcccaacacacagagtacacagtcctttctccccggctggccttaaaaagcatcatatcatgggtaacagacatattcttaggtgttatattccacacggtttcctgtcgagccaaacgctcatcagtgatattaataaactccccgggcagctcacttaagttcatgtcgctgtccagctgctgagccacaggctgctgtccaacttgcggttgcttaacgggcggcgaaggagaagtccacgcctacatgggggtagagtcataatcgtgcatcaggatagggcggtggtgctgcagcagcgcgcgaataaactgctgccgccgccgctccgtcctgcaggaatacaacatggcagtggtctcctcagcgatgattcgcaccgcccgcagcataaggcgccttgtcctccgggcacagcagcgcaccctgatctcacttaaatcagcacagtaactgcagcacagcaccacaatattgttcaaaatcccacagtgcaaggcgctgtatccaaagctcatggcggggaccacagaacccacgtggccatcataccacaagcgcaggtagattaagtggcgacccctcataaacacgctggacataaacattacctcttttggcatgttgtaattcaccacctcccggtaccatataaacctctgattaaacatggcgccatccaccaccatcctaaaccagctggccaaaacctgcccgccggctatacactgcagggaaccgggactggaacaatgacagtggagagcccaggactcgtaaccatggatcatcatgctcgtcatgatatcaatgttggcacaacacaggcacacgtgcatacacttcctcaggattacaagctcctcccgcgttagaaccatatcccagggaacaacccattcctgaatcagcgtaaatcccacactgcagggaagacctcgcacgtaactcacgttgtgcattgtcaaagtgttacattcgggcagcagcggatgatcctccagtatggtagcgcgggtttctgtctcaaaaggaggtagacgatccctactgtacggagtgcgccgagacaaccgagatcgtgttggtcgtagtgtcatgccaaatggaacgccggacgtagtcatatttcctgaagcaaaaccaggtgcgggcgtgacaaacagatctgcgtctccggtctcgccgcttagatcgctctgtgtagtagttgtagtatatccactctctcaaagcatccaggcgccccctggcttcgggttctatgtaaactccttcatgcgccgctgccctgataacatccaccaccgcagaataagccacacccagccaacctacacattcgttctgcgagtcacacacgggaggagcgggaagagctggaagaaccatgtttttttttttattccaaaagattatccaaaacctcaaaatgaagatctattaagtgaacgcgctcccctccggtggcgtggtcaaactctacagccaaagaacagataatggcatttgtaagatgttgcacaatggcttccaaaaggcaaacggccctcacgtccaagtggacgtaaaggctaaacccttcagggtgaatctcctctataaacattccagcaccttcaaccatgcccaaataattctcatctcgccaccttctcaatatatctctaagcaaatcccgaatattaagtccggccattgtaaaaatctgctccagagcgccctccaccttcagcctcaagcagcgaatcatgattgcaaaaattcaggttcctcacagacctgtataagattcaaaagcggaacattaacaaaaataccgcgatcccgtaggtcccttcgcagggccagctgaacataatcgtgcaggtctgcacggaccagcgcggccacttccccgccaggaaccatgacaaaagaacccacactgattatgacacgcatactcggagctatgctaaccagcgtagccccgatgtaagcttgttgcatgggcggcgatataaaatgcaaggtgctgctcaaaaaatcaggcaaagcctcgcgcaaaaaagaaagcacatcgtagtcatgctcatgcagataaaggcaggtaagctccggaaccaccacagaaaaagacaccatttttctctcaaacatgtctgcgggtttctgcataaacacaaaataaaataacaaaaaaacatttaaacattagaagcctgtcttacaacaggaaaaacaacccttataagcataagacggactacggccatgccggcgtgaccgtaaaaaaactggtcaccgtgattaaaaagcaccaccgacagctcctcggtcatgtccggagtcataatgtaagactcggtaaacacatcaggttgattcacatcggtcagtgctaaaaagcgaccgaaatagcccgggggaatacatacccgcaggcgtagagacaacattacagcccccataggaggtataacaaaattaataggagagaaaaacacataaacacctgaaaaaccctcctgcctaggcaaaatagcaccctcccgctccagaacaacatacagcgcttccacagcggcagccataacagtcagccttaccagtaaaaaagaaaacctattaaaaaaacaccactcgacacggcaccagctcaatcagtcacagtgtaaaaaagggccaagtgcagagcgagtatatataggactaaaaaatgacgtaacggttaaagtccacaaaaaacacccagaaaaccgcacgcgaacctacgcccagaaacgaaagccaaaaaacccacaacttcctcaaatcgtcacttccgttttcccacgttacgtcacttcccattttaagaaaactacaattcccaacacatacaagttactccgcccttaattaaatcggatccgatatctagatgtattcgcgaggtaccgagctcgaattctctggccgtcgttttacaacgtcgtgactgggaaaaccctggcgttacccaacttaatcgccttgcagcacatccccctttcgccagctggcgtaatagcgaagaggcccgcaccgatcgcccttcccaacagttgcgcagcctgaatggcgaatggcgcctgatgcggtattttctccttacgcatctgtgcggtatttcacaccgcatatggtgcactctcagtacaatctgctctgatgccgcatagttaagccagccccgacacccgccaacacccgctgacgcgccctgacgggcttgtctgctcccggcatccgcttacagacaagctgtgaccgtctccgggagctgcatgtgtcagaggttttcaccgtcatcaccgaaacgcgcga

SEQ ID NO: 115 - DNA, 886 bp, synthetic construct
  source 1..886: mol_type = other DNA
atggcacccaaaaagaagctgcagctgccgccgccacccacggacgaggaggaatactgggacagtcaggcagaggaggttttggacgaggaggaggaggacatgatggaagactgggagagcctagacgaggaagcttccgaggtcgaagaggtgtcagacgaaacaccgtcaccctcggtcgcattcccctcgccggcgccccagaaatcggcaaccggttccagcatggctacaacctccgctcctcaggcgccgccggcactgcccgttcgccgacccaaccgtagatgggacaccactggaaccagggccggtaagtccaagcagccgccgccgttagcccaagagcaacaacagcgccaaggctaccgctcatggcgcgggcacaagaacgccatagttgcttgcttgcaagactgtgggggcaacatctccttcgcccgccgctttcttctctaccatcacggcgtggccttcccccgtaacatcctgcattactaccgtcatctctacagcccatactgcaccggcggcagcggcagcaacagcagcggccacacagaagcaaaggcgaccggatagcaagactctgacaaagcccaagaaatccacagcggcggcagcagcaggaggaggagcgctgcgtctggcgcccaacgaacccgtatcgacccgcgagcttagaaacaggatttttcccactctgtatgctatatttcaacagagcaggggccaagaacaagagctgaaaataaaaaacaggtctctgcgatccctcacccgcagctgcctgtatcacaaaagcgaagatcagcttcggcgcacgctggaagacgcggaggctctcttcagtaaatactgcgcgctgactcttaaggactag

SEQ ID NO: 116 - protein, 227 aa, synthetic construct
MAPKKKLQLPPPPTDEEEYWDSQAEEVLDEEEEDMMEDWESLDEEASEVEEVSDETPSPSVAFPSPAPQKSATGSSMATTSAPQAPPALPVRRPNRRWDTTGTRAAHTAPAAAAATAAATQKQRRPDSKTLTKPKKSTAAAAAGGGALRLAPNEPVSTRELRNRIFPTLYAIFQQSRGQEQELKIKNRSLRSLTRSCLYHKSEDQLRRTLEDAEALFSKYCALTLKD

SEQ ID NO: 117 - DNA, 316 bp, synthetic construct
  source 1..316: mol_type = other DNA
atggcacccaaaaagaagctgcagctgccgccgccacccacggacgaggaggaatactgggacagtcaggcagaggaggttttggacgaggaggaggaggacatgatggaagactgggagagcctagacgaggaagcttccgaggtcgaagaggtgtcagacgaaacaccgtcaccctcggtcgcattcccctcgccggcgccccagaaatcggcaaccggttccagcatggctacaacctccgctcctcaggcgccgccggcactgcccgttcgccgacccaaccgtagatgggacaccactggaaccagggccg

SEQ ID NO: 118 - protein, 105 aa, synthetic construct
MAPKKKLQLPPPPTDEEEYWDSQAEEVLDEEEEDMMEDWESLDEEASEVEEVSDETPSPSVAFPSPAPQKSATGSSMATTSAPQAPPALPVRRPNRRWDTTGTRA

SEQ ID NO: 119 - DNA, 683 bp, synthetic construct
  source 1..683: mol_type = other DNA
atggcccccaagaagaagctgcagctgccccccccccccaccgacgaggaggaatactgggacagccaggccgaggaggtgctggacgaggaggaggaggacatgatggaagactgggagagcctggacgaggaagccagcgaggtggaggaggtgagcgacgagacccccagcccctccgtggccttccccagccccgccccccagaagagcgccaccggctccagcatggccaccacctccgccccccaggccccccccgccctgcccgtgagaagacccaacaggagatgggacaccaccggcaccagggccgcccacaccgcccccgccgcagctgcagcaacagcagctgccacccagaagcagaggagacctgatagcaagaccctgaccaagcccaagaaaagcaccgccgccgctgccgcagggggcggagccctgagactggcccccaacgagcccgtgagcaccagggagctgagaaacaggatttttcccaccctgtacgccatctttcagcagagcaggggccaggagcaggagctgaagatcaagaacaggagcctgagaagcctgaccagaagctgcctgtaccacaagagcgaggaccagctgagaaggacactggaagatgccgaggctctgtttagcaagtattgcgccctgaccctgaaggacta

SEQ ID NO: 120 - protein, 227 aa, synthetic construct; identical to SEQ ID NO: 116

SEQ ID NO: 121 - DNA, 3894 bp, synthetic construct
  source 1..3894: mol_type = other DNA
tcgcgcgtttcggtgatgacggtgaaaacctctgacacatgcagctcccggagacggtcacagcttgtctgtaagcggatgccgggagcagacaagcccgtcagggcgcgtcagcgggtgttggcgggtgtcggggctggcttaactatgcggcatcagagcagattgtactgagagtgcaccatatgcggtgtgaaataccgcacagatgcgtaaggagaaaataccgcatcaggcgccattcgccattcaggctgcgcaactgttgggaagggcgatcggtgcgggcctcttcgctattacgccagctggcgaaagggggatgtgctgcaaggcgattaagttgggtaacgccagggttttcccagtcacgacgttgtaaaacgacggccagtgaattcgagctcggtacctcgcgaatgcatctagatatttaaatgattaggttctacgaagaccaatcccgcccgcctaatgcggagcttaccgcctgcgtcattacccagggccacattcttggccaattgcaagccatcaacaaagcccgccaagagtttctgctacgaaagggacggggggtttacttggacccccagtccggcgaggagctcaacccaatccccccgccgccgcagccctatcagcagcagccgcgggcccttgcttcccaggatggcacccaaaaagaagctgcagctgccgccgccacccacggacgaggaggaatactgggacagtcaggcagaggaggttttggacgaggaggaggaggacatgatggaagactgggagagcctagacgaggaagcttccgaggtcgaagaggtgtcagacgaaacaccgtcaccctcggtcgcattcccctcgccggcgccccagaaatcggcaaccggttccagcatggctacaacctccgctcctcaggcgccgccggcactgcccgttcgccgacccaaccgtagatgggacaccactggaaccagggccggtaagtccaagcagccgccgccgttagcccaagagcaacaacagcgccaaggctaccgctcatggcgcgggcacaagaacgccatagttgcttgcttgcaagactgtgggggcaacatctccttcgcccgccgctttcttctctaccatcacggcgtggccttcccccgtaacatcctgcattactaccgtcatctctacagcccatactgcaccggcggcagcggcagcaacagcagcggccacacagaagcaaaggcgaccggatagcaagactctgacaaagcccaagaaatccacagcggcggcagcagcaggaggaggagcgctgcgtctggcgcccaacgaacccgtatcgacccgcgagcttagaaacaggatttttcccactctgtatgctatatttcaacagagcaggggccaagaacaagagctgaaaataaaaaacaggtctctgcgatccctcacccgcagctgcctgtatcacaaaagcgaagatcagcttcggcgcacgctggaagacgcggaggctctcttcagtaaatactgcgcgctgactcttaaggactagaataaaagatctttattttcattagatctgtgtgttggttttttgtgtggcggccgcatcggatcccgggcccgtcgactgcagaggcctgcatgcaagcttggcgtaatcatggtcatagctgtttcctgtgtgaaattgttatccgctcacaattccacacaacatacgagccggaagcataaagtgtaaagcctggggtgcctaatgagtgagctaactcacattaattgcgttgcgctcactgcccgctttccagtcgggaaacctgtcgtgccagctgcattaatgaatcggccaacgcgcggggagaggcggtttgcgtattgggcgctcttccgcttcctcgctcactgactcgctgcgctcggtcgttcggctgcggcgagcggtatcagctcactcaaaggcggtaatacggttatccacagaatcaggggataacgcaggaaagaacatgtgagcaaaaggccagcaaaaggccaggaaccgtaaaaaggccgcgttgctggcgtttttccataggctccgcccccctgacgagcatcacaaaaatcgacgctcaagtcagaggtggcgaaacccgacaggactataaagataccaggcgtttccccctggaagctccctcgtgcgctctcctgttccgaccctgccgcttaccggatacctgtccgcctttctcccttcgggaagcgtggcgctttctcatagctcacgctgtaggtatctcagttcggtgtaggtcgttcgctccaagctgggctgtgtgcacgaaccccccgttcagcccgaccgctgcgccttatccggtaactatcgtcttgagtccaacccggtaagacacgacttatcgccactggcagcagccactggtaacaggattagcagagcgaggtatgtaggcggtgctacagagttcttgaagtggtggcctaactacggctacactagaagaacagtatttggtatctgcgctctgctgaagccagttaccttcggaaaaagagttggtagctcttgatccggcaaacaaaccaccgctggtagcggtggtttttttgtttgcaagcagcagattacgcgcagaaaaaaaggatctcaagaagatcctttgatcttttctacggggtctgacgctcagtggaacgaaaactcacgttaagggattttggtcatgagattatcaaaaaggatcttcacctagatccttttaaattaaaaatgaagttttaaatcaatctaaagtatatatgagtaaacttggtctgacagttaccaatgcttaatcagtgaggcacctatctcagcgatctgtctatttcgttcatccatagttgcctgactccccgtcgtgtagataactacgatacgggagggcttaccatctggccccagtgctgcaatgataccgcgagacccacgctcaccggctccagatttatcagcaataaaccagccagccggaagggccgagcgcagaagtggtcctgcaactttatccgcctccatccagtctattaattgttgccgggaagctagagtaagtagttcgccagttaatagtttgcgcaacgttgttgccattgctacaggcatcgtggtgtcacgctcgtcgtttggtatggcttcattcagctccggttcccaacgatcaaggcgagttacatgatcccccatgttgtgcaaaaaagcggttagctccttcggtcctccgatcgttgtcagaagtaagttggccgcagtgttatcactcatggttatggcagcactgcataattctcttactgtcatgccatccgtaagatgcttttctgtgactggtgagtactcaaccaagtcattctgagaatagtgtatgcggcgaccgagttgctcttgcccggcgtcaatacgggataataccgcgccacatagcagaactttaaaagtgctcatcattggaaaacgttcttcggggcgaaaactctcaaggatcttaccgctgttgagatccagttcgatgtaacccactcgtgcacccaactgatcttcagcatcttttactttcaccagcgtttctgggtgagcaaaaacaggaaggcaaaatgccgcaaaaaagggaataagggcgacacggaaatgttgaatactcatactcttcctttttcaatattattgaagcatttatcagggttattgtctcatgagcggatacatatttgaatgtatttagaaaaataaacaaataggggttccgcgcacatttccccgaaaagtgccacctgacgtctaagaaaccattattatcatgacattaacctataaaaataggcgtatcacgaggccctttcgtc

SEQ ID NO: 122 - DNA, 3692 bp, synthetic construct
  source 1..3692: mol_type = other DNA
tcgcgcgtttcggtgatgacggtgaaaacctctgacacatgcagctcccggagacggtcacagcttgtctgtaagcggatgccgggagcagacaagcccgtcagggcgcgtcagcgggtgttggcgggtgtcggggctggcttaactatgcggcatcagagcagattgtactgagagtgcaccatatgcggtgtgaaataccgcacagatgcgtaaggagaaaataccgcatcaggcgccattcgccattcaggctgcgcaactgttgggaagggcgatcggtgcgggcctcttcgctattacgccagctggcgaaagggggatgtgctgcaaggcgattaagttgggtaacgccagggttttcccagtcacgacgttgtaaaacgacggccagtgaattcgagctcggtacctcgcgaatgcatctagatatttaaatgattaggttctacgaagaccaatcccgcccgcctaatgcggagcttaccgcctgcgtcattacccagggccacattcttggccaattgcaagccatcaacaaagcccgccaagagtttctgctacgaaagggacggggggtttacttggacccccagtccggcgaggagctcaacccaatccccccgccgccgcagccctatcagcagcagccgcgggcccttgcttcccaggatggcccccaagaagaagctgcagctgccccccccccccaccgacgaggaggaatactgggacagccaggccgaggaggtgctggacgaggaggaggaggacatgatggaagactgggagagcctggacgaggaagccagcgaggtggaggaggtgagcgacgagacccccagcccctccgtggccttccccagccccgccccccagaagagcgccaccggctccagcatggccaccacctccgccccccaggccccccccgccctgcccgtgagaagacccaacaggagatgggacaccaccggcaccagggccgcccacaccgcccccgccgcagctgcagcaacagcagctgccacccagaagcagaggagacctgatagcaagaccctgaccaagcccaagaaaagcaccgccgccgctgccgcagggggcggagccctgagactggcccccaacgagcccgtgagcaccagggagctgagaaacaggatttttcccaccctgtacgccatctttcagcagagcaggggccaggagcaggagctgaagatcaagaacaggagcctgagaagcctgaccagaagctgcctgtaccacaagagcgaggaccagctgagaaggacactggaagatgccgaggctctgtttagcaagtattgcgccctgaccctgaaggactagaataaaagatctttattttcattagatctgtgtgttggttttttgtgtggcggccgcatcggatcccgggcccgtcgactgcagaggcctgcatgcaagcttggcgtaatcatggtcatagctgtttcctgtgtgaaattgttatccgctcacaattccacacaacatacgagccggaagcataaagtgtaaagcctggggtgcctaatgagtgagctaactcacattaattgcgttgcgctcactgcccgctttccagtcgggaaacctgtcgtgccagctgcattaatgaatcggccaacgcgcggggagaggcggtttgcgtattgggcgctcttccgcttcctcgctcactgactcgctgcgctcggtcgttcggctgcggcgagcggtatcagctcactcaaaggcggtaatacggttatccacagaatcaggggataacgcaggaaagaacatgtgagcaaaaggccagcaaaaggccaggaaccgtaaaaaggccgcgttgctggcgtttttccataggctccgcccccctgacgagcatcacaaaaatcgacgctcaagtcagaggtggcgaaacccgacaggactataaagataccaggcgtttccccctggaagctccctcgtgcgctctcctgttccgaccctgccgcttaccggatacctgtccgcctttctcccttcgggaagcgtggcgctttctcatagctcacgctgtaggtatctcagttcggtgtaggtcgttcgctccaagctgggctgtgtgcacgaaccccccgttcagcccgaccgctgcgccttatccggtaactatcgtcttgagtccaacccggtaagacacgacttatcgccactggcagcagccactggtaacaggattagcagagcgaggtatgtaggcggtgctacagagttcttgaagtggtggcctaactacggctacactagaagaacagtatttggtatctgcgctctgctgaagccagttaccttcggaaaaagagttggtagctcttgatccggcaaacaaaccaccgctggtagcggtggtttttttgtttgcaagcagcagattacgcgcagaaaaaaaggatctcaagaagatcctttgatcttttctacggggtctgacgctcagtggaacgaaaactcacgttaagggattttggtcatgagattatcaaaaaggatcttcacctagatccttttaaattaaaaatgaagttttaaatcaatctaaagtatatatgagtaaacttggtctgacagttaccaatgcttaatcagtgaggcacctatctcagcgatctgtctatttcgttcatccatagttgcctgactccccgtcgtgtagataactacgatacgggagggcttaccatctggccccagtgctgcaatgataccgcgagacccacgctcaccggctccagatttatcagcaataaaccagccagccggaagggccgagcgcagaagtggtcctgcaactttatccgcctccatccagtctattaattgttgccgggaagctagagtaagtagttcgccagttaatagtttgcgcaacgttgttgccattgctacaggcatcgtggtgtcacgctcgtcgtttggtatggcttcattcagctccggttcccaacgatcaaggcgagttacatgatcccccatgttgtgcaaaaaagcggttagctccttcggtcctccgatcgttgtcagaagtaagttggccgcagtgttatcactcatggttatggcagcactgcataattctcttactgtcatgccatccgtaagatgcttttctgtgactggtgagtactcaaccaagtcattctgagaatagtgtatgcggcgaccgagttgctcttgcccggcgtcaatacgggataataccgcgccacatagcagaactttaaaagtgctcatcattggaaaacgttcttcggggcgaaaactctcaaggatcttaccgctgttgagatccagttcgatgtaacccactcgtgcacccaactgatcttcagcatcttttactttcaccagcgtttctgggtgagcaaaaacaggaaggcaaaatgccgcaaaaaagggaataagggcgacacggaaatgttgaatactcatactcttcctttttcaatattattgaagcatttatcagggttattgtctcatgagcggatacatatttgaatgtatttagaaaaataaacaaataggggttccgcgcacatttccccgaaaagtgccacctgacgtctaagaaaccattattatcatgacattaacctataaaaataggcgtatcacgaggccctttcgtc

SEQ ID NO: 123 - DNA, 3593 bp, synthetic construct
  source 1..3593: mol_type = other DNA
tcgcgcgtttcggtgatgacggtgaaaacctctgacacatgcagctcccggagacggtcacagcttgtctgtaagcggatgccgggagcagacaagcccgtcagggcgcgtcagcgggtgttggcgggtgtcggggctggcttaactatgcggcatcagagcagattgtactgagagtgcaccatatgcggtgtgaaataccgcacagatgcgtaaggagaaaataccgcatcaggcgccattcgccattcaggctgcgcaactgttgggaagggcgatcggtgcgggcctcttcgctattacgccagctggcgaaagggggatgtgctgcaaggcgattaagttgggtaacgccagggttttcccagtcacgacgttgtaaaacgacggccagtgaattcgagctcggtacctcgcgaatgcatctagatatttaaatgattaggttctacgaagaccaatcccgcccgcctaatgcggagcttaccgcctgcgtcattacccagggccacattcttggccaattgcaagccatcaacaaagcccgccaagagtttctgctacgaaagggacggggggtttacttggacccccagtccggcgaggagctcaacccaatccccccgccgccgcagccctatcagcagcagccgcgggcccttgcttcccaggatggcccccaagaagaagctgcagctgccgcccccacccaccgacgaggaggaatactgggacagccaggccgaggaggtgctggacgaggaggaggaggacatgatggaagactgggagagcctggacgaggaagcctccgaggtggaggaggtgagcgacgaaacacccagccccagcgtggccttccccagccccgccccccagaagagcgccaccggcagcagcatggccaccaccagcgccccccaggccccccccgccctgcccgtgagaaggcccaacagaagatgggacaccacaggcaccagggccggcaagagcaagcagccccctccactggcccaggagcaacagcagagacagggctacagatcctggagaggacacaagaacgccattgtggcctgcctgcaggactgcggcggcaacattagcttcgccagaaggtttctgctctatcaccacggcgtggccttccccagaaacatcctgcattactacagacatctctacagcccttactgcaccggcggaagcggcagcaacagcagcggccacaccgaggccaaggccaccggctgaaataaaagatctttattttcattagatctgtgtgttggttttttgtgtggcggccgcatcggatcccgggcccgtcgactgcagaggcctgcatgcaagcttggcgtaatcatggtcatagctgtttcctgtgtgaaattgttatccgctcacaattccacacaacatacgagccggaagcataaagtgtaaagcctggggtgcctaatgagtgagctaactcacattaattgcgttgcgctcactgcccgctttccagtcgggaaacctgtcgtgccagctgcattaatgaatcggccaacgcgcggggagaggcggtttgcgtattgggcgctcttccgcttcctcgctcactgactcgctgcgctcggtcgttcggctgcggcgagcggtatcagctcactcaaaggcggtaatacggttatccacagaatcaggggataacgcaggaaagaacatgtgagcaaaaggccagcaaaaggccaggaaccgtaaaaaggccgcgttgctggcgtttttccataggctccgcccccctgacgagcatcacaaaaatcgacgctcaagtcagaggtggcgaaacccgacaggactataaagataccaggcgtttccccctggaagctccctcgtgcgctctcctgttccgaccctgccgcttaccggatacctgtccgcctttctcccttcgggaagcgtggcgctttctcatagctcacgctgtaggtatctcagttcggtgtaggtcgttcgctccaagctgggctgtgtgcacgaaccccccgttcagcccgaccgctgcgccttatccggtaactatcgtcttgagtccaacccggtaagacacgacttatcgccactggcagcagccactggtaacaggattagcagagcgaggtatgtaggcggtgctacagagttcttgaagtggtggcctaactacggctacactagaagaacagtatttggtatctgcgctctgctgaagccagttaccttcggaaaaagagttggtagctcttgatccggcaaacaaaccaccgctggtagcggtggtttttttgtttgcaagcagcagattacgcgcagaaaaaaaggatctcaagaagatcctttgatcttttctacggggtctgacgctcagtggaacgaaaactcacgttaagggattttggtcatgagattatcaaaaaggatcttcacctagatccttttaaattaaaaatgaagttttaaatcaatctaaagtatatatgagtaaacttggtctgacagttaccaatgcttaatcagtgaggcacctatctcagcgatctgtctatttcgttcatccatagttgcctgactccccgtcgtgtagataactacgatacgggagggcttaccatctggccccagtgctgcaatgataccgcgagacccacgctcaccggctccagatttatcagcaataaaccagccagccggaagggccgagcgcagaagtggtcctgcaactttatccgcctccatccagtctattaattgttgccgggaagctagagtaagtagttcgccagttaatagtttgcgcaacgttgttgccattgctacaggcatcgtggtgtcacgctcgtcgtttggtatggcttcattcagctccggttcccaacgatcaaggcgagttacatgatcccccatgttgtgcaaaaaagcggttagctccttcggtcctccgatcgttgtcagaagtaagttggccgcagtgttatcactcatggttatggcagcactgcataattctcttactgtcatgccatccgtaagatgcttttctgtgactggtgagtactcaaccaagtcattctgagaatagtgtatgcggcgaccgagttgctcttgcccggcgtcaatacgggataataccgcgccacatagcagaactttaaaagtgctcatcattggaaaacgttcttcggggcgaaaactctcaaggatcttaccgctgttgagatccagttcgatgtaacccactcgtgcacccaactgatcttcagcatcttttactttcaccagcgtttctgggtgagcaaaaacaggaaggcaaaatgccgcaaaaaagggaataagggcgacacggaaatgttgaatactcatactcttcctttttcaatattattgaagcatttatcagggttattgtctcatgagcggatacatatttgaatgtatttagaaaaataaacaaataggggttccgcgcacatttccccgaaaagtgccacctgacgtctaagaaaccattattatcatgacattaacctataaaaataggcgtatcacgaggccctttcgtc

SEQ ID NO: 124 - DNA, 3987 bp, synthetic construct
  source 1..3987: mol_type = other DNA
tcgcgcgtttcggtgatgacggtgaaaacctctgacacatgcagctcccggagacggtcacagcttgtctgtaagcggatgccgggagcagacaagcccgtcagggcgcgtcagcgggtgttggcgggtgtcggggctggcttaactatgcggcatcagagcagattgtactgagagtgcaccatatgcggtgtgaaataccgcacagatgcgtaaggagaaaataccgcatcaggcgccattcgccattcaggctgcgcaactgttgggaagggcgatcggtgcgggcctcttcgctattacgccagctggcgaaagggggatgtgctgcaaggcgattaagttgggtaacgccagggttttcccagtcacgacgttgtaaaacgacggccagtgaattcgagctcggtacctcgcgaatgcatctagatatttaaatgattaggttctacgaagaccaatcccgcccgcctaatgcggagcttaccggctccggtgcccgtcagtgggcagagcgcacatcgcccacagtccccgagaagttggggggaggggtcggcaattgaaccggtgcctagagaaggtggcgcggggtaaactgggaaagtgatgtcgtgtactggctccgcctttttcccgagggtgggggagaaccgtatataagtgcagtagtcgccgtgaacgttctttttcgcaacgggtttgccgccagaacacagccgccgcagccctatcagcagcagccgcgggcccttgcttcccaggatggcacccaaaaagaagctgcagctgccgccgccacccacggacgaggaggaatactgggacagtcaggcagaggaggttttggacgaggaggaggaggacatgatggaagactgggagagcctagacgaggaagcttccgaggtcgaagaggtgtcagacgaaacaccgtcaccctcggtcgcattcccctcgccggcgccccagaaatcggcaaccggttccagcatggctacaacctccgctcctcaggcgccgccggcactgcccgttcgccgacccaaccgtagatgggacaccactggaaccagggccggtaagtccaagcagccgccgccgttagcccaagagcaacaacagcgccaaggctaccgctcatggcgcgggcacaagaacgccatagttgcttgcttgcaagactgtgggggcaacatctccttcgcccgccgctttcttctctaccatcacggcgtggccttcccccgtaacatcctgcattactaccgtcatctctacagcccatactgcaccggcggcagcggcagcaacagcagcggccacacagaagcaaaggcgaccggatagcaagactctgacaaagcccaagaaatccacagcggcggcagcagcaggaggaggagcgctgcgtctggcgcccaacgaacccgtatcgacccgcgagcttagaaacaggatttttcccactctgtatgctatatttcaacagagcaggggccaagaacaagagctgaaaataaaaaacaggtctctgcgatccctcacccgcagctgcctgtatcacaaaagcgaagatcagcttcggcgcacgctggaagacgcggaggctctcttcagtaaatactgcgcgctgactcttaaggactagaataaaagatctttattttcattagatctgtgtgttggttttttgtgtggcggccgcatcggatcccgggcccgtcgactgcagaggcctgcatgcaagcttggcgtaatcatggtcatagctgtttcctgtgtgaaattgttatccgctcacaattccacacaacatacgagccggaagcataaagtgtaaagcctggggtgcctaatgagtgagctaactcacattaattgcgttgcgctcactgcccgctttccagtcgggaaacctgtcgtgccagctgcattaatgaatcggccaacgcgcggggagaggcggtttgcgtattgggcgctcttccgcttcctcgctcactgactcgctgcgctcggtcgttcggctgcggcgagcggtatcagctcactcaaaggcggtaatacggttatccacagaatcaggggataacgcaggaaagaacatgtgagcaaaaggccagcaaaaggccaggaaccgtaaaaaggccgcgttgctggcgtttttccataggctccgcccccctgacgagcatcacaaaaatcgacgctcaagtcagaggtggcgaaacccgacaggactataaagataccaggcgtttccccctggaagctccctcgtgcgctctcctgttccgaccctgccgcttaccggatacctgtccgcctttctcccttcgggaagcgtggcgctttctcatagctcacgctgtaggtatctcagttcggtgtaggtcgttcgctccaagctgggctgtgtgcacgaaccccccgttcagcccgaccgctgcgccttatccggtaactatcgtcttgagtccaacccggtaagacacgacttatcgccactggcagcagccactggtaacaggattagcagagcgaggtatgtaggcggtgctacagagttcttgaagtggtggcctaactacggctacactagaagaacagtatttggtatctgcgctctgctgaagccagttaccttcggaaaaagagttggtagctcttgatccggcaaacaaaccaccgctggtagcggtggtttttttgtttgcaagcagcagattacgcgcagaaaaaaaggatctcaagaagatcctttgatcttttctacggggtctgacgctcagtggaacgaaaactcacgttaagggattttggtcatgagattatcaaaaaggatcttcacctagatccttttaaattaaaaatgaagttttaaatcaatctaaagtatatatgagtaaacttggtctgacagttaccaatgcttaatcagtgaggcacctatctcagcgatctgtctatttcgttcatccatagttgcctgactccccgtcgtgtagataactacgatacgggagggcttaccatctggccccagtgctgcaatgataccgcgagacccacgctcaccggctccagatttatcagcaataaaccagccagccggaagggccgagcgcagaagtggtcctgcaactttatccgcctccatccagtctattaattgttgccgggaagctagagtaagtagttcgccagttaatagtttgcgcaacgttgttgccattgctacaggcatcgtggtgtcacgctcgtcgtttggtatggcttcattcagctccggttcccaacgatcaaggcgagttacatgatcccccatgttgtgcaaaaaagcggttagctccttcggtcctccgatcgttgtcagaagtaagttggccgcagtgttatcactcatggttatggcagcactgcataattctcttactgtcatgccatccgtaagatgcttttctgtgactggtgagtactcaaccaagtcattctgagaatagtgtatgcggcgaccgagttgctcttgcccggcgtcaatacgggataataccgcgccacatagcagaactttaaaagtgctcatcattggaaaacgttcttcggggcgaaaactctcaaggatcttaccgctgttgagatccagttcgatgtaacccactcgtgcacccaactgatcttcagcatcttttactttcaccagcgtttctgggtgagcaaaaacaggaaggcaaaatgccgcaaaaaagggaataagggcgacacggaaatgttgaatactcatactcttcctttttcaatattattgaagcatttatcagggttattgtctcatgagcggatacatatttgaatgtatttagaaaaataaacaaataggggttccgcgcacatttccccgaaaagtgccacctgacgtctaagaaaccattattatcatgacattaacctataaaaataggcgtatcacgaggccctttcgtc

SEQ ID NO: 125 - DNA, 10368 bp, synthetic construct
  source 1..10368: mol_type = other DNA
taaggatccgaattcagtactcatatgttgacaattaatcatcggcatagtatatcggcatagtataatacgactcactataggagggccaccaaggtgaggaactaaaccatgagccatattcaacgggaaacgtcgaggccgcgattaaattccaacatggatgctgatttatatgggtataaatgggctcgcgataatgtcgggcaatcaggtgcgacaatctatcgcttgtatgggaagcccgatgcgccagagttgtttctgaaacatggcaaaggtagcgttgccaatgatgttacagatgagatggtcagactaaactggctgacggaatttatgccacttccgaccatcaagcattttatccgtactcctgatgatgcatggttactcaccactgcgatccccggaaaaacagcgttccaggtattagaagaatatcctgattcaggtgaaaatattgttgatgcgctggcagtgttcctgcgccggttgcactcgattcctgtttgtaattgtccttttaacagcgatcgcgtatttcgcctcgctcaggcgcaatcacgaatgaataacggtttggttgatgcgagtgattttgatgacgagcgtaatggctggcctgttgaacaagtctggaaagaaatgcataaacttttgccattctcaccggattcagtcgtcactcatggtgatttctcacttgataaccttatttttgacgaggggaaattaataggttgtattgatgttggacgagtcggaatcgcagaccgataccaggatcttgccatcctatggaactgcctcggtgagttttctccttcattacagaaacggctttttcaaaaatatggtattgataatcctgatatgaataaattgcagtttcatttgatgctcgatgagtttttctaataaaaacccgcttcggcgggtttttttatgcatgtgagcaaaaggccagcaaaaggccaggaaccgtaaaaaggccgcgttgctggcgtttttccataggctccgcccccctgacgagcatcacaaaaatcgacgctcaagtcagaggtggcgaaacccgacaggactataaagataccaggcgtttccccctggaagctccctcgtgcgctctcctgttccgaccctgccgcttaccggatacctgtccgcctttctcccttcgggaagcgtggcgctttctcatagctcacgctgtaggtatctcagttcggtgtaggtcgttcgctccaagctgggctgtgtgcacgaaccccccgttcagcccgaccgctgcgccttatccggtaactatcgtcttgagtccaacccggtaagacacgacttatcgccactggcagcagccactggtaacaggattagcagagcgaggtatgtaggcggtgctacagagttcttgaagtggtggcctaactacggctacactagaagaacagtatttggtatctgcgctctgctgaagccagttaccttcggaaaaagagttggtagctcttgatccggcaaacaaaccaccgctggtagcggtggtttttttgtttgcaagcagcagattacgcgcagaaaaaaaggatctcaagaagatcctttgatcttttctacggggtctgacgctcagtggaacgaaaactcacgttaagggattttggtcatgtcgaactgacattgattattgactagttattaatagtaatcaattacggggtcattagttcatagcccatatatggagttccgcgttacataacttacggtaaatggcccgcctggctgaccgcccaacgacccccgcccattgacgtcaataatgacgtatgttcccatagtaacgccaatagggactttccattgacgtcaatgggtggagtatttacggtaaactgcccacttggcagtacatcaagtgtatcatatgccaagtacgccccctattgacgtcaatgacggtaaatggcccgcctggcattatgcccagtacatgaccttatgggactttcctacttggcagtacatctacgtattagtcatcgctattaccatggtgatgcggttttggcagtacatcaatgggcgtggatagcggtttgactcacggggatttccaagtctccaccccattgacgtcaatgggagtttgttttggcaccaaaatcaacgggactttccaaaatgtcgtaacaactccgccccattgacgcaaatgggcggtaggcgtgtacggtgggaggtctatataagcagagctggcgaataacgcgttctttttcgcaacgggtttgccgccagaacacagccgccgcagccctatcagcagcagccgcgggcccttgcttcccaggatggcccccaagaagaagctgcagctgccccccccccccaccgacgaggaggaatactgggacagccaggccgaggaggtgctggacgaggaggaggaggacatgatggaagactgggagagcctggacgaggaagccagcgaggtggaggaggtgagcgacgagacccccagcccctccgtggccttccccagccccgccccccagaagagcgccaccggctccagcatggccaccacctccgccccccaggccccccccgccctgcccgtgagaagacccaacaggagatgggacaccaccggcaccagggccgcccacaccgcccccgccgcagctgcagcaacagcagctgccacccagaagcagaggagacctgatagcaagaccctgaccaagcccaagaaaagcaccgccgccgctgccgcagggggcggagccctgagactggcccccaacgagcccgtgagcaccagggagctgagaaacaggatttttcccaccctgtacgccatctttcagcagagcaggggccaggagcaggagctgaagatcaagaacaggagcctgagaagcctgaccagaagctgcctgtaccacaagagcgaggaccagctgagaaggacactggaagatgccgaggctctgtttagcaagtattgcgccctgaccctgaaggactagaataaaagatctttattttcattagatctgtgtgttggttttttgtgtggcggcctcgacgttcctatccgtagatgtacctggacatccaggtgatgccggcggcggtggtggaggcgcgcggaaagtcgcggacgcggttccagatgttgcgcagcggcaaaaagtgctccatggtcgggacgctctggccggtgaggcgtgcgcagtcgttgacgctctagaccgtgcaaaaggagagcctgtaagcgggcactcttccgtggtctggtggataaattcgcaagggtatcatggcggacgaccggggttcgaaccccggatccggccgtccgccgtgatccatgcggttaccgcccgcgtgtcgaacccaggtgtgcgacgtcagacaacgggggagcgctccttttggcttccttccaggcgcggcggctgctgcgctagcttttttggccactggccgcgcgcggcgtaagcggttaggctggaaagcgaaagcattaagtggctcgctccctgtagccggagggttattttccaagggttgagtcgcaggacccccggttcgagtctcgggccggccggactgcggcgaacgggggtttgcctccccgtcatgcaagaccccgcttgcaaattcctccggaaacagggacgagccccttttttgcttttcccagatgcatccggtgctgcggcagatgcgcccccctcctcagcagcggcaagagcaagagcagcggcagacatgcagggcaccctccccttctcctaccgcgtcaggaggggcaacatcgatccagacatgataagatacattgatgagtttggacaaaccacaactagaatgcagtgaaaaaaatgctttatttgtgaaatttgtgatgctattgctttatttgtaaccattataagctgcaataaacaagtttgtacactctcgggtgattatttacccccacccttgccgtctgcgccgtttaaaaatcaaaggggttctgccgcgcatcgctatgcgccactggcagggacacgttgcgatactggtgtttagtgctccacttaaactcaggcacaaccatccgcggcagctcggtgaagttttcactccacaggctgcgcaccatcaccaacgcgtttagcaggtcgggcgccgatatcttgaagtcgcagttggggcctccgccctgcgcgcgcgagttgcgatacacagggttgcagcactggaacactatcagcgccgggtggtgcacgctggccagcacgctcttgtcggagatcagatccgcgtccaggtcctccgcgttgctcagggcgaacggagtcaactttggtagctgccttcccaaaaagggcgcgtgcccaggctttgagttgcactcgcaccgtagtggcatcaaaaggtgaccgtgcccggtctgggcgttaggatacagcgcctgcataaaagccttgatctgcttaaaagccacctgagcctttgcgccttcagagaagaacatgccgcaagacttgccggaaaactgattggccggacaggccgcgtcgtgcacgcagcaccttgcgtcggtgttggagatctgcaccacatttcggccccaccggttcttcacgatcttggccttgctagactgctccttcagcgcgcgctgcccgttttcgctcgtcacatccatttcaatcacgtgctccttatttatcataatgcttccgtgtagacacttaagctcgccttcgatctcagcgcagcggtgcagccacaacgcgcagcccgtgggctcgtgatgcttgtaggtcacctctgcaaacgactgcaggtacgcctgcaggaatcgccccatcatcgtcacaaaggtcttgttgctggtgaaggtcagctgcaacccgcggtgctcctcgttcagccaggtcttgcatacggccgccagagcttccacttggtcaggcagtagtttgaagttcgcctttagatcgttatccacgtggtacttgtccatcagcgcgcgcgcagcctccatgcccttctcccacgcagacacgatcggcacactcagcgggttcatcaccgtaatttcactttccgcttcgctgggctcttcctcttcctcttgcgtccgcataccacgcgccactgggtcgtcttcattcagccgccgcactgtgcgcttacctcctttgccatgcttgattagcaccggtgggttgctgaaacccaccatttgtagcgccacatcttctctttcttcctcgctgtccacgattacctctggtgatggcgggcgctcgggcttgggagaagggcgcttctttttcttcttgggcgcaatggccaaatccgccgccgaggtcgatggccgcgggctgggtgtgcgcggcaccagcgcgtcttgtgatgagtcttcctcgtcctcggactcgatacgccgcctcatccgcttttttgggggcgcccggggaggcggcggcgacggggacggggacgacacgtcctccatggttgggggacgtcgcgccgcaccgcgtccgcgctcgggggtggtttcgcgctgctcctcttcccgactggccatttccttctcctataggcagaaaaagatccacaaaagcgaagatcagcttcggcgcacgctggaagacgcggaggctctcttcagtaaatactgcgcgctgactcttaaggactagtttcgcgccctttctcaaatttaagcgcgaaaactacgtcatctccagcggccacacccggcgccagcacctgttgtcagcgccattggcgcgcccgcccgccgcgcgcttcgctttttatagggccgccgccgccgccgcctcgccataaaaggaaactttcggagcgcgccgctctgattggctgccgccgcacctctccgcctcgccccgccccgcccctcgccccgccccgccccgcctggcgcgcgccccccccccccccccgcccccatcgctgcacaaaataattaaaaaataaataaatacaaaattgggggtggggaggggggggagatggggagagtgaagcagaacgtggggctcacctcgaggccggccgaatatcttcatttaaatgtttaaacatcgatgcggccgcgattaggttctacgaagaccaatcccgcccgcctaatgcggagcttaccgcctgcgtcattacccagggccacattcttggccaattgcaagccatcaacaaagcccgccaagagtttctgctacgaaagggacggggggtttacttggacccccagtccggcgaggagctcaacccaatccccccgccgccgcagccctatcagcagcagccgcgggcccttgcttcccaggatggcacccaaaaagaagctgcagctgccgccgccacccacggacgaggaggaatactgggacagtcaggcagaggaggttttggacgaggaggaggaggacatgatggaagactgggagagcctagacgaggaagcttccgaggtcgaagaggtgtcagacgaaacaccgtcaccctcggtcgcattcccctcgccggcgccccagaaatcggcaaccggttccagcatggctacaacctccgctcctcaggcgccgccggcactgcccgttcgccgacccaaccgtagatgggacaccactggaaccagggccggtaagtccaagcagccgccgccgttagcccaagagcaacaacagcgccaaggctaccgctcatggcgcgggcacaagaacgccatagttgcttgcttgcaagactgtgggggcaacatctccttcgcccgccgctttcttctctaccatcacggcgtggccttcccccgtaacatcctgcattactaccgtcatctctacagcccatactgcaccggcggcagcggcagcaacagcagcggccacacagaagcaaaggcgaccggatagcaagactctgacaaagcccaagaaatccacagcggcggcagcagcaggaggaggagcgctgcgtctggcgcccaacgaacccgtatcgacccgcgagcttagaaacaggatttttcccactctgtatgctatatttcaacagagcaggggccaagaacaagagctgaaaataaaaaacaggtctctgcgatccctcacccgcagctgcctgtatcacaaaagcgaagatcagcttcggcgcacgctggaagacgcggaggctctcttcagtaaatactgcgcgctgactcttaaggactagaataaaagatctttattttcattagatctgtgtgttggttttttgtgtggcggccgccgtttgtgttatgtttcaacgtgtttatttttcaattgcagaaaatttcaagtcatttttcattcagtagtatagccccaccaccacatagcttatacagatcaccgtaccttaatcaaactcacagaaccctagtattcaacctgccacctccctcccaacacacagagtacacagtcctttctccccggctggccttaaaaagcatcatatcatgggtaacagacatattcttaggtgttatattccacacggtttcctgtcgagccaaacgctcatcagtgatattaataaactccccgggcagctcacttaagttcatgtcgctgtccagctgctgagccacaggctgctgtccaacttgcggttgcttaacgggcggcgaaggagaagtccacgcctacatgggggtagagtcataatcgtgcatcaggatagggcggtggtgctgcagcagcgcgcgaataaactgctgccgccgccgctccgtcctgcaggaatacaacatggcagtggtctcctcagcgatgattcgcaccgcccgcagcataaggcgccttgtcctccgggcacagcagcgcaccctgatctcacttaaatcagcacagtaactgcagcacagcaccacaatattgttcaaaatcccacagtgcaaggcgctgtatccaaagctcatggcggggaccacagaacccacgtggccatcataccacaagcgcaggtagattaagtggcgacccctcataaacacgctggacataaacattacctcttttggcatgttgtaattcaccacctcccggtaccatataaacctctgattaaacatggcgccatccaccaccatcctaaaccagctggccaaaacctgcccgccggctatacactgcagggaaccgggactggaacaatgacagtggagagcccaggactcgtaaccatggatcatcatgctcgtcatgatatcaatgttggcacaacacaggcacacgtgcatacacttcctcaggattacaagctcctcccgcgttagaaccatatcccagggaacaacccattcctgaatcagcgtaaatcccacactgcagggaagacctcgcacgtaactcacgttgtgcattgtcaaagtgttacattcgggcagcagcggatgatcctccagtatggtagcgcgggtttctgtctcaaaaggaggtagacgatccctactgtacggagtgcgccgagacaaccgagatcgtgttggtcgtagtgtcatgccaaatggaacgccggacgtagtcatatttcctgaagcaaaaccaggtgcgggcgtgacaaacagatctgcgtctccggtctcgccgcttagatcgctctgtgtagtagttgtagtatatccactctctcaaagcatccaggcgccccctggcttcgggttctatgtaaactccttcatgcgccgctgccctgataacatccaccaccgcagaataagccacacccagccaacctacacattcgttctgcgagtcacacacgggaggagcgggaagagctggaagaaccatgtttttttttttattccaaaagattatccaaaacctcaaaatgaagatctattaagtgaacgcgctcccctccggtggcgtggtcaaactctacagccaaagaacagataatggcatttgtaagatgttgcacaatggcttccaaaaggcaaacggccctcacgtccaagtggacgtaaaggctaaacccttcagggtgaatctcctctataaacattccagcaccttcaaccatgcccaaataattctcatctcgccaccttctcaatatatctctaagcaaatcccgaatattaagtccggccattgtaaaaatctgctccagagcgccctccaccttcagcctcaagcagcgaatcatgattgcaaaaattcaggttcctcacagacctgtataagattcaaaagcggaacattaacaaaaataccgcgatcccgtaggtcccttcgcagggccagctgaacataatcgtgcaggtctgcacggaccagcgcggccacttccccgccaggaaccatgacaaaagaacccacactgattatgacacgcatactcggagctatgctaaccagcgtagccccgatgtaagcttgttgcatgggcggcgatataaaatgcaaggtgctgctcaaaaaatcaggcaaagcctcgcgcaaaaaagaaagcacatcgtagtcatgctcatgcagataaaggcaggtaagctccggaaccaccacagaaaaagacaccatttttctctcaaacatgtctgcgggtttctgcataaacacaaaataaaataacaaaaaaacatttaaacattagaagcctgtcttacaacaggaaaaacaacccttataagcataagacggactacggccatgccggcgtgaccgtaaaaaaactggtcaccgtgattaaaaagcaccaccgacagctcctcggtcatgtccggagtcataatgtaagactcggtaaacacatcaggttgattcacatcggtcagtgctaaaaagcgaccgaaatagcccgggggaatacatacccgcaggcgtagagacaacattacagcccccataggaggtataacaaaattaataggagagaaaaacacataaacacctgaaaaaccctcctgcctaggcaaaatagcaccctcccgctccagaacaacatacagcgcttccacagcggcagccataacagtcagccttaccagtaaaaaagaaaacctattaaaaaaacaccactcgacacggcaccagctcaatcagtcacagtgtaaaaaagggccaagtgcagagcgagtatatataggactaaaaaatgacgtaacggttaaagtccacaaaaaacacccagaaaaccgcacgcgaacctacgcccagaaacgaaagccaaaaaacccacaacttcctcaaatcgtcacttccgttttcccacgttacgtcacttcccattttaagaaaactacaattcccaacacatacaagttactccgcccttaat

SEQ ID NO: 126 - DNA, 10368 bp, synthetic construct
  source 1..10368: mol_type = other DNA
taaggatccgaattcagtactcatatgttgacaattaatcatcggcatagtatatcggcatagtataatacgactcactataggagggccaccaaggtgaggaactaaaccatgagccatattcaacgggaaacgtcgaggccgcgattaaattccaacatggatgctgatttatatgggtataaatgggctcgcgataatgtcgggcaatcaggtgcgacaatctatcgcttgtatgggaagcccgatgcgccagagttgtttctgaaacatggcaaaggtagcgttgccaatgatgttacagatgagatggtcagactaaactggctgacggaatttatgccacttccgaccatcaagcattttatccgtactcctgatgatgcatggttactcaccactgcgatccccggaaaaacagcgttccaggtattagaagaatatcctgattcaggtgaaaatattgttgatgcgctggcagtgttcctgcgccggttgcactcgattcctgtttgtaattgtccttttaacagcgatcgcgtatttcgcctcgctcaggcgcaatcacgaatgaataacggtttggttgatgcgagtgattttgatgacgagcgtaatggctggcctgttgaacaagtctggaaagaaatgcataaacttttgccattctcaccggattcagtcgtcactcatggtgatttctcacttgataaccttatttttgacgaggggaaattaataggttgtattgatgttggacgagtcggaatcgcagaccgataccaggatcttgccatcctatggaactgcctcggtgagttttctccttcattacagaaacggctttttcaaaaatatggtattgataatcctgatatgaataaattgcagtttcatttgatgctcgatgagtttttctaataaaaacccgcttcggcgggtttttttatgcatgtgagcaaaaggccagcaaaaggccaggaaccgtaaaaaggccgcgttgctggcgtttttccataggctccgcccccctgacgagcatcacaaaaatcgacgctcaagtcagaggtggcgaaacccgacaggactataaagataccaggcgtttccccctggaagctccctcgtgcgctctcctgttccgaccctgccgcttaccggatacctgtccgcctttctcccttcgggaagcgtggcgctttctcatagctcacgctgtaggtatctcagttcggtgtaggtcgttcgctccaagctgggctgtgtgcacgaaccccccgttcagcccgaccgctgcgccttatccggtaactatcgtcttgagtccaacccggtaagacacgacttatcgccactggcagcagccactggtaacaggattagcagagcgaggtatgtaggcggtgctacagagttcttgaagtggtggcctaactacggctacactagaagaacagtatttggtatctgcgctctgctgaagccagttaccttcggaaaaagagttggtagctcttgatccggcaaacaaaccaccgctggtagcggtggtttttttgtttgcaagcagcagattacgcgcagaaaaaaaggatctcaagaagatcctttgatcttttctacggggtctgacgctcagtggaacgaaaactcacgttaagggattttggtcatgtcgaggccgccacacaaaaaaccaacacacagatctaatgaaaataaagatcttttattctagtccttcagggtcagggcgcaatacttgctaaacagagcctcggcatcttccagtgtccttctcagctggtcctcgctcttgtggtacaggcagcttctggtcaggcttctcaggctcctgttcttgatcttcagctcctgctcctggcccctgctctgctgaaagatggcgtacagggtgggaaaaatcctgtttctcagctccctggtgctcacgggctcgttgggggccagtctcagggctccgccccctgcggcagcggcggcggtgcttttcttgggcttggtcagggtcttgctatcaggtctcctctgcttctgggtggcagctgctgttgctgcagctgcggcgggggcggtgtgggcggccctggtgccggtggtgtcccatctcctgttgggtcttctcacgggcagggcggggggggcctggggggcggaggtggtggccatgctggagccggtggcgctcttctggggggcggggctggggaaggccacggaggggctgggggtctcgtcgctcacctcctccacctcgctggcttcctcgtccaggctctcccagtcttccatcatgtcctcctcctcctcgtccagcacctcctcggcctggctgtcccagtattcctcctcgtcggtggggggggggggcagctgcagcttcttcttgggggccatcctgggaagcaagggcccgcggctgctgctgatagggctgcggcggctgtgttctggcggcaaacccgttgcgaaaaagaacgcgttattcgccagctctgcttatatagacctcccaccgtacacgcctaccgcccatttgcgtcaatggggcggagttgttacgacattttggaaagtcccgttgattttggtgccaaaacaaactcccattgacgtcaatggggtggagacttggaaatccccgtgagtcaaaccgctatccacgcccattgatgtactgccaaaaccgcatcaccatggtaatagcgatgactaatacgtagatgtactgccaagtaggaaagtcccataaggtcatgtactgggcataatgccaggcgggccatttaccgtcattgacgtcaatagggggcgtacttggcatatgatacacttgatgtactgccaagtgggcagtttaccgtaaatactccacccattgacgtcaatggaaagtccctattggcgttactatgggaacatacgtcattattgacgtcaatgggcgggggtcgttgggcggtcagccaggcgggccatttaccgtaagttatgtaacgcggaactccatatatgggctatgaactaatgaccccgtaattgattactattaataactagtcaataatcaatgtcagttcgacgttcctatccgtagatgtacctggacatccaggtgatgccggcggcggtggtggaggcgcgcggaaagtcgcggacgcggttccagatgttgcgcagcggcaaaaagtgctccatggtcgggacgctctggccggtgaggcgtgcgcagtcgttgacgctctagaccgtgcaaaaggagagcctgtaagcgggcactcttccgtggtctggtggataaattcgcaagggtatcatggcggacgaccggggttcgaaccccggatccggccgtccgccgtgatccatgcggttaccgcccgcgtgtcgaacccaggtgtgcgacgtcagacaacgggggagcgctccttttggcttccttccaggcgcggcggctgctgcgctagcttttttggccactggccgcgcgcggcgtaagcggttaggctggaaagcgaaagcattaagtggctcgctccctgtagccggagggttattttccaagggttgagtcgcaggacccccggttcgagtctcgggccggccggactgcggcgaacgggggtttgcctccccgtcatgcaagaccccgcttgcaaattcctccggaaacagggacgagccccttttttgcttttcccagatgcatccggtgctgcggcagatgcgcccccctcctcagcagcggcaagagcaagagcagcggcagacatgcagggcaccctccccttctcctaccgcgtcaggaggggcaacatcgatccagacatgataagatacattgatgagtttggacaaaccacaactagaatgcagtgaaaaaaatgctttatttgtgaaatttgtgatgctattgctttatttgtaaccattataagctgcaataaacaagtttgtacactctcgggtgattatttacccccacccttgccgtctgcgccgtttaaaaatcaaaggggttctgccgcgcatcgctatgcgccactggcagggacacgttgcgatactggtgtttagtgctccacttaaactcaggcacaaccatccgcggcagctcggtgaagttttcactccacaggctgcgcaccatcaccaacgcgtttagcaggtcgggcgccgatatcttgaagtcgcagttggggcctccgccctgcgcgcgcgagttgcgatacacagggttgcagcactggaacactatcagcgccgggtggtgcacgctggccagcacgctcttgtcggagatcagatccgcgtccaggtcctccgcgttgctcagggcgaacggagtcaactttggtagctgccttcccaaaaagggcgcgtgcccaggctttgagttgcactcgcaccgtagtggcatcaaaaggtgaccgtgcccggtctgggcgttaggatacagcgcctgcataaaagccttgatctgcttaaaagccacctgagcctttgcgccttcagagaagaacatgccgcaagacttgccggaaaactgattggccggacaggccgcgtcgtgcacgcagcaccttgcgtcggtgttggagatctgcaccacatttcggccccaccggttcttcacgatcttggccttgctagactgctccttcagcgcgcgctgcccgttttcgctcgtcacatccatttcaatcacgtgctccttatttatcataatgcttccgtgtagacacttaagctcgccttcgatctcagcgcagcggtgcagccacaacgcgcagcccgtgggctcgtgatgcttgtaggtcacctctgcaaacgactgcaggtacgcctgcaggaatcgccccatcatcgtcacaaaggtcttgttgctggtgaaggtcagctgcaacccgcggtgctcctcgttcagccaggtcttgcatacggccgccagagcttccacttggtcaggcagtagtttgaagttcgcctttagatcgttatccacgtggtacttgtccatcagcgcgcgcgcagcctccatgcccttctcccacgcagacacgatcggcacactcagcgggttcatcaccgtaatttcactttccgcttcgctgggctcttcctcttcctcttgcgtccgcataccacgcgccactgggtcgtcttcattcagccgccgcactgtgcgcttacctcctttgccatgcttgattagcaccggtgggttgctgaaacccaccatttgtagcgccacatcttctctttcttcctcgctgtccacgattacctctggtgatggcgggcgctcgggcttgggagaagggcgcttctttttcttcttgggcgcaatggccaaatccgccgccgaggtcgatggccgcgggctgggtgtgcgcggcaccagcgcgtcttgtgatgagtcttcctcgtcctcggactcgatacgccgcctcatccgcttttttgggggcgcccggggaggcggcggcgacggggacggggacgacacgtcctccatggttgggggacgtcgcgccgcaccgcgtccgcgctcgggggtggtttcgcgctgctcctcttcccgactggccatttccttctcctataggcagaaaaagatccacaaaagcgaagatcagcttcggcgcacgctggaagacgcggaggctctcttcagtaaatactgcgcgctgactcttaaggactagtttcgcgccctttctcaaatttaagcgcgaaaactacgtcatctccagcggccacacccggcgccagcacctgttgtcagcgccattggcgcgcccgcccgccgcgcgcttcgctttttatagggccgccgccgccgccgcctcgccataaaaggaaactttcggagcgcgccgctctgattggctgccgccgcacctctccgcctcgccccgccccgcccctcgccccgccccgccccgcctggcgcgcgccccccccccccccccgcccccatcgctgcacaaaataattaaaaaataaataaatacaaaattgggggtggggaggggggggagatggggagagtgaagcagaacgtggggctcacctcgaggccggccgaatatcttcatttaaatgtttaaacatcgatgcggccgcgattaggttctacgaagaccaatcccgcccgcctaatgcggagcttaccgcctgcgtcattacccagggccacattcttggccaattgcaagccatcaacaaagcccgccaagagtttctgctacgaaagggacggggggtttacttggacccccagtccggcgaggagctcaacccaatccccccgccgccgcagccctatcagcagcagccgcgggcccttgcttcccaggatggcacccaaaaagaagctgcagctgccgccgccacccacggacgaggaggaatactgggacagtcaggcagaggaggttttggacgaggaggaggaggacatgatggaagactgggagagcctagacgaggaagcttccgaggtcgaagaggtgtcagacgaaacaccgtcaccctcggtcgcattcccctcgccggcgccccagaaatcggcaaccggttccagcatggctacaacctccgctcctcaggcgccgccggcactgcccgttcgccgacccaaccgtagatgggacaccactggaaccagggccggtaagtccaagcagccgccgccgttagcccaagagcaacaacagcgccaaggctaccgctcatggcgcgggcacaagaacgccatagttgcttgcttgcaagactgtgggggcaacatctccttcgcccgccgctttcttctctaccatcacggcgtggccttcccccgtaacatcctgcattactaccgtcatctctacagcccatactgcaccggcggcagcggcagcaacagcagcggccacacagaagcaaaggcgaccggatagcaagactctgacaaagcccaagaaatccacagcggcggcagcagcaggaggaggagcgctgcgtctggcgcccaacgaacccgtatcgacccgcgagcttagaaacaggatttttcccactctgtatgctatatttcaacagagcaggggccaagaacaagagctgaaaataaaaaacaggtctctgcgatccctcacccgcagctgcctgtatcacaaaagcgaagatcagcttcggcgcacgctggaagacgcggaggctctcttcagtaaatactgcgcgctgactcttaaggactagaataaaagatctttattttcattagatctgtgtgttggttttttgtgtggcggccgccgtttgtgttatgtttcaacgtgtttatttttcaattgcagaaaatttcaagtcatttttcattcagtagtatagccccaccaccacatagcttatacagatcaccgtaccttaatcaaactcacagaaccctagtattcaacctgccacctccctcccaacacacagagtacacagtcctttctccccggctggccttaaaaagcatcatatcatgggtaacagacatattcttaggtgttatattccacacggtttcctgtcgagccaaacgctcatcagtgatattaataaactccccgggcagctcacttaagttcatgtcgctgtccagctgctgagccacaggctgctgtccaacttgcggttgcttaacgggcggcgaaggagaagtccacgcctacatgggggtagagtcataatcgtgcatcaggatagggcggtggtgctgcagcagcgcgcgaataaactgctgccgccgccgctccgtcctgcaggaatacaacatggcagtggtctcctcagcgatgattcgcaccgcccgcagcataaggcgccttgtcctccgggcacagcagcgcaccctgatctcacttaaatcagcacagtaactgcagcacagcaccacaatattgttcaaaatcccacagtgcaaggcgctgtatccaaagctcatggcggggaccacagaacccacgtggccatcataccacaagcgcaggtagattaagtggcgacccctcataaacacgctggacataaacattacctcttttggcatgttgtaattcaccacctcccggtaccatataaacctctgattaaacatggcgccatccaccaccatcctaaaccagctggccaaaacctgcccgccggctatacactgcagggaaccgggactggaacaatgacagtggagagcccaggactcgtaaccatggatcatcatgctcgtcatgatatcaatgttggcacaacacaggcacacgtgcatacacttcctcaggattacaagctcctcccgcgttagaaccatatcccagggaacaacccattcctgaatcagcgtaaatcccacactgcagggaagacctcgcacgtaactcacgttgtgcattgtcaaagtgttacattcgggcagcagcggatgatcctccagtatggtagcgcgggtttctgtctcaaaaggaggtagacgatccctactgtacggagtgcgccgagacaaccgagatcgtgttggtcgtagtgtcatgccaaatggaacgccggacgtagtcatatttcctgaagcaaaaccaggtgcgggcgtgacaaacagatctgcgtctccggtctcgccgcttagatcgctctgtgtagtagttgtagtatatccactctctcaaagcatccaggcgccccctggcttcgggttctatgtaaactccttcatgcgccgctgccctgataacatccaccaccgcagaataagccacacccagccaacctacacattcgttctgcgagtcacacacgggaggagcgggaagagctggaagaaccatgtttttttttttattccaaaagattatccaaaacctcaaaatgaagatctattaagtgaacgcgctcccctccggtggcgtggtcaaactctacagccaaagaacagataatggcatttgtaagatgttgcacaatggcttccaaaaggcaaacggccctcacgtccaagtggacgtaaaggctaaacccttcagggtgaatctcctctataaacattccagcaccttcaaccatgcccaaataattctcatctcgccaccttctcaatatatctctaagcaaatcccgaatattaagtccggccattgtaaaaatctgctccagagcgccctccaccttcagcctcaagcagcgaatcatgattgcaaaaattcaggttcctcacagacctgtataagattcaaaagcggaacattaacaaaaataccgcgatcccgtaggtcccttcgcagggccagctgaacataatcgtgcaggtctgcacggaccagcgcggccacttccccgccaggaaccatgacaaaagaacccacactgattatgacacgcatactcggagctatgctaaccagcgtagccccgatgtaagcttgttgcatgggcggcgatataaaatgcaaggtgctgctcaaaaaatcaggcaaagcctcgcgcaaaaaagaaagcacatcgtagtcatgctcatgcagataaaggcaggtaagctccggaaccaccacagaaaaagacaccatttttctctcaaacatgtctgcgggtttctgcataaacacaaaataaaataacaaaaaaacatttaaacattagaagcctgtcttacaacaggaaaaacaacccttataagcataagacggactacggccatgccggcgtgaccgtaaaaaaactggtcaccgtgattaaaaagcaccaccgacagctcctcggtcatgtccggagtcataatgtaagactcggtaaacacatcaggttgattcacatcggtcagtgctaaaaagcgaccgaaatagcccgggggaatacatacccgcaggcgtagagacaacattacagcccccataggaggtataacaaaattaataggagagaaaaacacataaacacctgaaaaaccctcctgcctaggcaaaatagcaccctcccgctccagaacaacatacagcgcttccacagcggcagccataacagtcagccttaccagtaaaaaagaaaacctattaaaaaaacaccactcgacacggcaccagctcaatcagtcacagtgtaaaaaagggccaagtgcagagcgagtatatataggactaaaaaatgacgtaacggttaaagtccacaaaaaacacccagaaaaccgcacgcgaacctacgcccagaaacgaaagccaaaaaacccacaacttcctcaaatcgtcacttccgttttcccacgttacgtcacttcccattttaagaaaactacaattcccaacacatacaagttactccgcccttaat

SEQ ID NO: 127 - DNA, 10027 bp, synthetic construct
  source 1..10027: mol_type = other DNA
taaggatccgaattcagtactcatatgttgacaattaatcatcggcatagtatatcggcatagtataatacgactcactataggagggccaccaaggtgaggaactaaaccatgagccatattcaacgggaaacgtcgaggccgcgattaaattccaacatggatgctgatttatatgggtataaatgggctcgcgataatgtcgggcaatcaggtgcgacaatctatcgcttgtatgggaagcccgatgcgccagagttgtttctgaaacatggcaaaggtagcgttgccaatgatgttacagatgagatggtcagactaaactggctgacggaatttatgccacttccgaccatcaagcattttatccgtactcctgatgatgcatggttactcaccactgcgatccccggaaaaacagcgttccaggtattagaagaatatcctgattcaggtgaaaatattgttgatgcgctggcagtgttcctgcgccggttgcactcgattcctgtttgtaattgtccttttaacagcgatcgcgtatttcgcctcgctcaggcgcaatcacgaatgaataacggtttggttgatgcgagtgattttgatgacgagcgtaatggctggcctgttgaacaagtctggaaagaaatgcataaacttttgccattctcaccggattcagtcgtcactcatggtgatttctcacttgataaccttatttttgacgaggggaaattaataggttgtattgatgttggacgagtcggaatcgcagaccgataccaggatcttgccatcctatggaactgcctcggtgagttttctccttcattacagaaacggctttttcaaaaatatggtattgataatcctgatatgaataaattgcagtttcatttgatgctcgatgagtttttctaataaaaacccgcttcggcgggtttttttatgcatgtgagcaaaaggccagcaaaaggccaggaaccgtaaaaaggccgcgttgctggcgtttttccataggctccgcccccctgacgagcatcacaaaaatcgacgctcaagtcagaggtggcgaaacccgacaggactataaagataccaggcgtttccccctggaagctccctcgtgcgctctcctgttccgaccctgccgcttaccggatacctgtccgcctttctcccttcgggaagcgtggcgctttctcatagctcacgctgtaggtatctcagttcggtgtaggtcgttcgctccaagctgggctgtgtgcacgaaccccccgttcagcccgaccgctgcgccttatccggtaactatcgtcttgagtccaacccggtaagacacgacttatcgccactggcagcagccactggtaacaggattagcagagcgaggtatgtaggcggtgctacagagttcttgaagtggtggcctaactacggctacactagaagaacagtatttggtatctgcgctctgctgaagccagttaccttcggaaaaagagttggtagctcttgatccggcaaacaaaccaccgctggtagcggtggtttttttgtttgcaagcagcagattacgcgcagaaaaaaaggatctcaagaagatcctttgatcttttctacggggtctgacgctcagtggaacgaaaactcacgttaagggattttggtcatgtcgactagatatttaaatgattaggttctacgaagaccaatcccgcccgcctaatgcggagcttaccggctccggtgcccgtcagtgggcagagcgcacatcgcccacagtccccgagaagttggggggaggggtcggcaattgaaccggtgcctagagaaggtggcgcggggtaaactgggaaagtgatgtcgtgtactggctccgcctttttcccgagggtgggggagaaccgtatataagtgcagtagtcgccgtgaacgttctttttcgcaacgggtttgccgccagaacacagccgccgcagccctatcagcagcagccgcgggcccttgcttcccaggatggcccccaagaagaagctgcagctgccccccccccccaccgacgaggaggaatactgggacagccaggccgaggaggtgctggacgaggaggaggaggacatgatggaagactgggagagcctggacgaggaagccagcgaggtggaggaggtgagcgacgagacccccagcccctccgtggccttccccagccccgccccccagaagagcgccaccggctccagcatggccaccacctccgccccccaggccccccccgccctgcccgtgagaagacccaacaggagatgggacaccaccggcaccagggccgcccacaccgcccccgccgcagctgcagcaacagcagctgccacccagaagcagaggagacctgatagcaagaccctgaccaagcccaagaaaagcaccgccgccgctgccgcagggggcggagccctgagactggcccccaacgagcccgtgagcaccagggagctgagaaacaggatttttcccaccctgtacgccatctttcagcagagcaggggccaggagcaggagctgaagatcaagaacaggagcctgagaagcctgaccagaagctgcctgtaccacaagagcgaggaccagctgagaaggacactggaagatgccgaggctctgtttagcaagtattgcgccctgaccctgaaggactagaataaaagatctttattttcattagatctgtgtgttggttttttgtgtggcggcctcgacgttcctatccgtagatgtacctggacatccaggtgatgccggcggcggtggtggaggcgcgcggaaagtcgcggacgcggttccagatgttgcgcagcggcaaaaagtgctccatggtcgggacgctctggccggtgaggcgtgcgcagtcgttgacgctctagaccgtgcaaaaggagagcctgtaagcgggcactcttccgtggtctggtggataaattcgcaagggtatcatggcggacgaccggggttcgaaccccggatccggccgtccgccgtgatccatgcggttaccgcccgcgtgtcgaacccaggtgtgcgacgtcagacaacgggggagcgctccttttggcttccttccaggcgcggcggctgctgcgctagcttttttggccactggccgcgcgcggcgtaagcggttaggctggaaagcgaaagcattaagtggctcgctccctgtagccggagggttattttccaagggttgagtcgcaggacccccggttcgagtctcgggccggccggactgcggcgaacgggggtttgcctccccgtcatgcaagaccccgcttgcaaattcctccggaaacagggacgagccccttttttgcttttcccagatgcatccggtgctgcggcagatgcgcccccctcctcagcagcggcaagagcaagagcagcggcagacatgcagggcaccctccccttctcctaccgcgtcaggaggggcaacatcgatccagacatgataagatacattgatgagtttggacaaaccacaactagaatgcagtgaaaaaaatgctttatttgtgaaatttgtgatgctattgctttatttgtaaccattataagctgcaataaacaagtttgtacactctcgggtgattatttacccccacccttgccgtctgcgccgtttaaaaatcaaaggggttctgccgcgcatcgctatgcgccactggcagggacacgttgcgatactggtgtttagtgctccacttaaactcaggcacaaccatccgcggcagctcggtgaagttttcactccacaggctgcgcaccatcaccaacgcgtttagcaggtcgggcgccgatatcttgaagtcgcagttggggcctccgccctgcgcgcgcgagttgcgatacacagggttgcagcactggaacactatcagcgccgggtggtgcacgctggccagcacgctcttgtcggagatcagatccgcgtccaggtcctccgcgttgctcagggcgaacggagtcaactttggtagctgccttcccaaaaagggcgcgtgcccaggctttgagttgcactcgcaccgtagtggcatcaaaaggtgaccgtgcccggtctgggcgttaggatacagcgcctgcataaaagccttgatctgcttaaaagccacctgagcctttgcgccttcagagaagaacatgccgcaagacttgccggaaaactgattggccggacaggccgcgtcgtgcacgcagcaccttgcgtcggtgttggagatctgcaccacatttcggccccaccggttcttcacgatcttggccttgctagactgctccttcagcgcgcgctgcccgttttcgctcgtcacatccatttcaatcacgtgctccttatttatcataatgcttccgtgtagacacttaagctcgccttcgatctcagcgcagcggtgcagccacaacgcgcagcccgtgggctcgtgatgcttgtaggtcacctctgcaaacgactgcaggtacgcctgcaggaatcgccccatcatcgtcacaaaggtcttgttgctggtgaaggtcagctgcaacccgcggtgctcctcgttcagccaggtcttgcatacggccgccagagcttccacttggtcaggcagtagtttgaagttcgcctttagatcgttatccacgtggtacttgtccatcagcgcgcgcgcagcctccatgcccttctcccacgcagacacgatcggcacactcagcgggttcatcaccgtaatttcactttccgcttcgctgggctcttcctcttcctcttgcgtccgcataccacgcgccactgggtcgtcttcattcagccgccgcactgtgcgcttacctcctttgccatgcttgattagcaccggtgggttgctgaaacccaccatttgtagcgccacatcttctctttcttcctcgctgtccacgattacctctggtgatggcgggcgctcgggcttgggagaagggcgcttctttttcttcttgggcgcaatggccaaatccgccgccgaggtcgatggccgcgggctgggtgtgcgcggcaccagcgcgtcttgtgatgagtcttcctcgtcctcggactcgatacgccgcctcatccgcttttttgggggcgcccggggaggcggcggcgacggggacggggacgacacgtcctccatggttgggggacgtcgcgccgcaccgcgtccgcgctcgggggtggtttcgcgctgctcctcttcccgactggccatttccttctcctataggcagaaaaagatccacaaaagcgaagatcagcttcggcgcacgctggaagacgcggaggctctcttcagtaaatactgcgcgctgactcttaaggactagtttcgcgccctttctcaaatttaagcgcgaaaactacgtcatctccagcggccacacccggcgccagcacctgttgtcagcgccattggcgcgcccgcccgccgcgcgcttcgctttttatagggccgccgccgccgccgcctcgccataaaaggaaactttcggagcgcgccgctctgattggctgccgccgcacctctccgcctcgccccgccccgcccctcgccccgccccgccccgcctggcgcgcgccccccccccccccccgcccccatcgctgcacaaaataattaaaaaataaataaatacaaaattgggggtggggaggggggggagatggggagagtgaagcagaacgtggggctcacctcgaggccggccgaatatcttcatttaaatgtttaaacatcgatgcggccgcgattaggttctacgaagaccaatcccgcccgcctaatgcggagcttaccgcctgcgtcattacccagggccacattcttggccaattgcaagccatcaacaaagcccgccaagagtttctgctacgaaagggacggggggtttacttggacccccagtccggcgaggagctcaacccaatccccccgccgccgcagccctatcagcagcagccgcgggcccttgcttcccaggatggcacccaaaaagaagctgcagctgccgccgccacccacggacgaggaggaatactgggacagtcaggcagaggaggttttggacgaggaggaggaggacatgatggaagactgggagagcctagacgaggaagcttccgaggtcgaagaggtgtcagacgaaacaccgtcaccctcggtcgcattcccctcgccggcgccccagaaatcggcaaccggttccagcatggctacaacctccgctcctcaggcgccgccggcactgcccgttcgccgacccaaccgtagatgggacaccactggaaccagggccggtaagtccaagcagccgccgccgttagcccaagagcaacaacagcgccaaggctaccgctcatggcgcgggcacaagaacgccatagttgcttgcttgcaagactgtgggggcaacatctccttcgcccgccgctttcttctctaccatcacggcgtggccttcccccgtaacatcctgcattactaccgtcatctctacagcccatactgcaccggcggcagcggcagcaacagcagcggccacacagaagcaaaggcgaccggatagcaagactctgacaaagcccaagaaatccacagcggcggcagcagcaggaggaggagcgctgcgtctggcgcccaacgaacccgtatcgacccgcgagcttagaaacaggatttttcccactctgtatgctatatttcaacagagcaggggccaagaacaagagctgaaaataaaaaacaggtctctgcgatccctcacccgcagctgcctgtatcacaaaagcgaagatcagcttcggcgcacgctggaagacgcggaggctctcttcagtaaatactgcgcgctgactcttaaggactagaataaaagatctttattttcattagatctgtgtgttggttttttgtgtggcggccgccgtttgtgttatgtttcaacgtgtttatttttcaattgcagaaaatttcaagtcatttttcattcagtagtatagccccaccaccacatagcttatacagatcaccgtaccttaatcaaactcacagaaccctagtattcaacctgccacctccctcccaacacacagagtacacagtcctttctccccggctggccttaaaaagcatcatatcatgggtaacagacatattcttaggtgttatattccacacggtttcctgtcgagccaaacgctcatcagtgatattaataaactccccgggcagctcacttaagttcatgtcgctgtccagctgctgagccacaggctgctgtccaacttgcggttgcttaacgggcggcgaaggagaagtccacgcctacatgggggtagagtcataatcgtgcatcaggatagggcggtggtgctgcagcagcgcgcgaataaactgctgccgccgccgctccgtcctgcaggaatacaacatggcagtggtctcctcagcgatgattcgcaccgcccgcagcataaggcgccttgtcctccgggcacagcagcgcaccctgatctcacttaaatcagcacagtaactgcagcacagcaccacaatattgttcaaaatcccacagtgcaaggcgctgtatccaaagctcatggcggggaccacagaacccacgtggccatcataccacaagcgcaggtagattaagtggcgacccctcataaacacgctggacataaacattacctcttttggcatgttgtaattcaccacctcccggtaccatataaacctctgattaaacatggcgccatccaccaccatcctaaaccagctggccaaaacctgcccgccggctatacactgcagggaaccgggactggaacaatgacagtggagagcccaggactcgtaaccatggatcatcatgctcgtcatgatatcaatgttggcacaacacaggcacacgtgcatacacttcctcaggattacaagctcctcccgcgttagaaccatatcccagggaacaacccattcctgaatcagcgtaaatcccacactgcagggaagacctcgcacgtaactcacgttgtgcattgtcaaagtgttacattcgggcagcagcggatgatcctccagtatggtagcgcgggtttctgtctcaaaaggaggtagacgatccctactgtacggagtgcgccgagacaaccgagatcgtgttggtcgtagtgtcatgccaaatggaacgccggacgtagtcatatttcctgaagcaaaaccaggtgcgggcgtgacaaacagatctgcgtctccggtctcgccgcttagatcgctctgtgtagtagttgtagtatatccactctctcaaagcatccaggcgccccctggcttcgggttctatgtaaactccttcatgcgccgctgccctgataacatccaccaccgcagaataagccacacccagccaacctacacattcgttctgcgagtcacacacgggaggagcgggaagagctggaagaaccatgtttttttttttattccaaaagattatccaaaacctcaaaatgaagatctattaagtgaacgcgctcccctccggtggcgtggtcaaactctacagccaaagaacagataatggcatttgtaagatgttgcacaatggcttccaaaaggcaaacggccctcacgtccaagtggacgtaaaggctaaacccttcagggtgaatctcctctataaacattccagcaccttcaaccatgcccaaataattctcatctcgccaccttctcaatatatctctaagcaaatcccgaatattaagtccggccattgtaaaaatctgctccagagcgccctccaccttcagcctcaagcagcgaatcatgattgcaaaaattcaggttcctcacagacctgtataagattcaaaagcggaacattaacaaaaataccgcgatcccgtaggtcccttcgcagggccagctgaacataatcgtgcaggtctgcacggaccagcgcggccacttccccgccaggaaccatgacaaaagaacccacactgattatgacacgcatactcggagctatgctaaccagcgtagccccgatgtaagcttgttgcatgggcggcgatataaaatgcaaggtgctgctcaaaaaatcaggcaaagcctcgcgcaaaaaagaaagcacatcgtagtcatgctcatgcagataaaggcaggtaagctccggaaccaccacagaaaaagacaccatttttctctcaaacatgtctgcgggtttctgcataaacacaaaataaaataacaaaaaaacatttaaacattagaagcctgtcttacaacaggaaaaacaacccttataagcataagacggactacggccatgccggcgtgaccgtaaaaaaactggtcaccgtgattaaaaagcaccaccgacagctcctcggtcatgtccggagtcataatgtaagactcggtaaacacatcaggttgattcacatcggtcagtgctaaaaagcgaccgaaatagcccgggggaatacatacccgcaggcgtagagacaacattacagcccccataggaggtataacaaaattaataggagagaaaaacacataaacacctgaaaaaccctcctgcctaggcaaaatagcaccctcccgctccagaacaacatacagcgcttccacagcggcagccataacagtcagccttaccagtaaaaaagaaaacctattaaaaaaacaccactcgacacggcaccagctcaatcagtcacagtgtaaaaaagggccaagtgcagagcgagtatatataggactaaaaaatgacgtaacggttaaagtccacaaaaaacacccagaaaaccgcacgcgaacctacgcccagaaacgaaagccaaaaaacccacaacttcctcaaatcgtcacttccgttttcccacgttacgtcacttcccattttaagaaaactacaattcccaacacatacaagttactccgcccttaat

SEQ ID NO: 128 - DNA, 10027 bp, synthetic construct
  source 1..10027: mol_type = other DNA
taaggatccgaattcagtactcatatgttgacaattaatcatcggcatagtatatcggcatagtataatacgactcactataggagggccaccaaggtgaggaactaaaccatgagccatattcaacgggaaacgtcgaggccgcgattaaattccaacatggatgctgatttatatgggtataaatgggctcgcgataatgtcgggcaatcaggtgcgacaatctatcgcttgtatgggaagcccgatgcgccagagttgtttctgaaacatggcaaaggtagcgttgccaatgatgttacagatgagatggtcagactaaactggctgacggaatttatgccacttccgaccatcaagcattttatccgtactcctgatgatgcatggttactcaccactgcgatccccggaaaaacagcgttccaggtattagaagaatatcctgattcaggtgaaaatattgttgatgcgctggcagtgttcctgcgccggttgcactcgattcctgtttgtaattgtccttttaacagcgatcgcgtatttcgcctcgctcaggcgcaatcacgaatgaataacggtttggttgatgcgagtgattttgatgacgagcgtaatggctggcctgttgaacaagtctggaaagaaatgcataaacttttgccattctcaccggattcagtcgtcactcatggtgatttctcacttgataaccttatttttgacgaggggaaattaataggttgtattgatgttggacgagtcggaatcgcagaccgataccaggatcttgccatcctatggaactgcctcggtgagttttctccttcattacagaaacggctttttcaaaaatatggtattgataatcctgatatgaataaattgcagtttcatttgatgctcgatgagtttttctaataaaaacccgcttcggcgggtttttttatgcatgtgagcaaaaggccagcaaaaggccaggaaccgtaaaaaggccgcgttgctggcgtttttccataggctccgcccccctgacgagcatcacaaaaatcgacgctcaagtcagaggtggcgaaacccgacaggactataaagataccaggcgtttccccctggaagctccctcgtgcgctctcctgttccgaccctgccgcttaccggatacctgtccgcctttctcccttcgggaagcgtggcgctttctcatagctcacgctgtaggtatctcagttcggtgtaggtcgttcgctccaagctgggctgtgtgcacgaaccccccgttcagcccgaccgctgcgccttatccggtaactatcgtcttgagtccaacccggtaagacacgacttatcgccactggcagcagccactggtaacaggattagcagagcgaggtatgtaggcggtgctacagagttcttgaagtggtggcctaactacggctacactagaagaacagtatttggtatctgcgctctgctgaagccagttaccttcggaaaaagagttggtagctcttgatccggcaaacaaaccaccgctggtagcggtggtttttttgtttgcaagcagcagattacgcgcagaaaaaaaggatctcaagaagatcctttgatcttttctacggggtctgacgctcagtggaacgaaaactcacgttaagggattttggtcatgtcgaggccgccacacaaaaaaccaacacacagatctaatgaaaataaagatcttttattctagtccttcagggtcagggcgcaatacttgctaaacagagcctcggcatcttccagtgtccttctcagctggtcctcgctcttgtggtacaggcagcttctggtcaggcttctcaggctcctgttcttgatcttcagctcctgctcctggcccctgctctgctgaaagatggcgtacagggtgggaaaaatcctgtttctcagctccctggtgctcacgggctcgttgggggccagtctcagggctccgccccctgcggcagcggcggcggtgcttttcttgggcttggtcagggtcttgctatcaggtctcctctgcttctgggtggcagctgctgttgctgcagctgcggcgggggcggtgtgggcggccctggtgccggtggtgtcccatctcctgttgggtcttctcacgggcagggcggggggggcctggggggcggaggtggtggccatgctggagccggtggcgctcttctggggggcggggctggggaaggccacggaggggctgggggtctcgtcgctcacctcctccacctcgctggcttcctcgtccaggctctcccagtcttccatcatgtcctcctcctcctcgtccagcacctcctcggcctggctgtcccagtattcctcctcgtcggtggggggggggggcagctgcagcttcttcttgggggccatcctgggaagcaagggcccgcggctgctgctgatagggctgcggcggctgtgttctggcggcaaacccgttgcgaaaaagaacgttcacggcgactactgcacttatatacggttctcccccaccctcgggaaaaaggcggagccagtacacgacatcactttcccagtttaccccgcgccaccttctctaggcaccggttcaattgccgacccctccccccaacttctcggggactgtgggcgatgtgcgctctgcccactgacgggcaccggagccggtaagctccgcattaggcgggcgggattggtcttcgtagaacctaatcatttaaatatctagtcgacgttcctatccgtagatgtacctggacatccaggtgatgccggcggcggtggtggaggcgcgcggaaagtcgcggacgcggttccagatgttgcgcagcggcaaaaagtgctccatggtcgggacgctctggccggtgaggcgtgcgcagtcgttgacgctctagaccgtgcaaaaggagagcctgtaagcgggcactcttccgtggtctggtggataaattcgcaagggtatcatggcggacgaccggggttcgaaccccggatccggccgtccgccgtgatccatgcggttaccgcccgcgtgtcgaacccaggtgtgcgacgtcagacaacgggggagcgctccttttggcttccttccaggcgcggcggctgctgcgctagcttttttggccactggccgcgcgcggcgtaagcggttaggctggaaagcgaaagcattaagtggctcgctccctgtagccggagggttattttccaagggttgagtcgcaggacccccggttcgagtctcgggccggccggactgcggcgaacgggggtttgcctccccgtcatgcaagaccccgcttgcaaattcctccggaaacagggacgagccccttttttgcttttcccagatgcatccggtgctgcggcagatgcgcccccctcctcagcagcggcaagagcaagagcagcggcagacatgcagggcaccctccccttctcctaccgcgtcaggaggggcaacatcgatccagacatgataagatacattgatgagtttggacaaaccacaactagaatgcagtgaaaaaaatgctttatttgtgaaatttgtgatgctattgctttatttgtaaccattataagctgcaataaacaagtttgtacactctcgggtgattatttacccccacccttgccgtctgcgccgtttaaaaatcaaaggggttctgccgcgcatcgctatgcgccactggcagggacacgttgcgatactggtgtttagtgctccacttaaactcaggcacaaccatccgcggcagctcggtgaagttttcactccacaggctgcgcaccatcaccaacgcgtttagcaggtcgggcgccgatatcttgaagtcgcagttggggcctccgccctgcgcgcgcgagttgcgatacacagggttgcagcactggaacactatcagcgccgggtggtgcacgctggccagcacgctcttgtcggagatcagatccgcgtccaggtcctccgcgttgctcagggcgaacggagtcaactttggtagctgccttcccaaaaagggcgcgtgcccaggctttgagttgcactcgcaccgtagtggcatcaaaaggtgaccgtgcccggtctgggcgttaggatacagcgcctgcataaaagccttgatctgcttaaaagccacctgagcctttgcgccttcagagaagaacatgccgcaagacttgccggaaaactgattggccggacaggccgcgtcgtgcacgcagcaccttgcgtcggtgttggagatctgcaccacatttcggccccaccggttcttcacgatcttggccttgctagactgctccttcagcgcgcgctgcccgttttcgctcgtcacatccatttcaatcacgtgctccttatttatcataatgcttccgtgtagacacttaagctcgccttcgatctcagcgcagcggtgcagccacaacgcgcagcccgtgggctcgtgatgcttgtaggtcacctctgcaaacgactgcaggtacgcctgcaggaatcgccccatcatcgtcacaaaggtcttgttgctggtgaaggtcagctgcaacccgcggtgctcctcgttcagccaggtcttgcatacggccgccagagcttccacttggtcaggcagtagtttgaagttcgcctttagatcgttatccacgtggtacttgtccatcagcgcgcgcgcagcctccatgcccttctcccacgcagacacgatcggcacactcagcgggttcatcaccgtaatttcactttccgcttcgctgggctcttcctcttcctcttgcgtccgcataccacgcgccactgggtcgtcttcattcagccgccgcactgtgcgcttacctcctttgccatgcttgattagcaccggtgggttgctgaaacccaccatttgtagcgccacatcttctctttcttcctcgctgtccacgattacctctggtgatggcgggcgctcgggcttgggagaagggcgcttctttttcttcttgggcgcaatggccaaatccgccgccgaggtcgatggccgcgggctgggtgtgcgcggcaccagcgcgtcttgtgatgagtcttcctcgtcctcggactcgatacgccgcctcatccgcttttttgggggcgcccggggaggcggcggcgacggggacggggacgacacgtcctccatggttgggggacgtcgcgccgcaccgcgtccgcgctcgggggtggtttcgcgctgctcctcttcccgactggccatttccttctcctataggcagaaaaagatccacaaaagcgaagatcagcttcggcgcacgctggaagacgcggaggctctcttcagtaaatactgcgcgctgactcttaaggactagtttcgcgccctttctcaaatttaagcgcgaaaactacgtcatctccagcggccacacccggcgccagcacctgttgtcagcgccattggcgcgcccgcccgccgcgcgcttcgctttttatagggccgccgccgccgccgcctcgccataaaaggaaactttcggagcgcgccgctctgattggctgccgccgcacctctccgcctcgccccgccccgcccctcgccccgccccgccccgcctggcgcgcgccccccccccccccccgcccccatcgctgcacaaaataattaaaaaataaataaatacaaaattgggggtggggaggggggggagatggggagagtgaagcagaacgtggggctcacctcgaggccggccgaatatcttcatttaaatgtttaaacatcgatgcggccgcgattaggttctacgaagaccaatcccgcccgcctaatgcggagcttaccgcctgcgtcattacccagggccacattcttggccaattgcaagccatcaacaaagcccgccaagagtttctgctacgaaagggacggggggtttacttggacccccagtccggcgaggagctcaacccaatccccccgccgccgcagccctatcagcagcagccgcgggcccttgcttcccaggatggcacccaaaaagaagctgcagctgccgccgccacccacggacgaggaggaatactgggacagtcaggcagaggaggttttggacgaggaggaggaggacatgatggaagactgggagagcctagacgaggaagcttccgaggtcgaagaggtgtcagacgaaacaccgtcaccctcggtcgcattcccctcgccggcgccccagaaatcggcaaccggttccagcatggctacaacctccgctcctcaggcgccgccggcactgcccgttcgccgacccaaccgtagatgggacaccactggaaccagggccggtaagtccaagcagccgccgccgttagcccaagagcaacaacagcgccaaggctaccgctcatggcgcgggcacaagaacgccatagttgcttgcttgcaagactgtgggggcaacatctccttcgcccgccgctttcttctctaccatcacggcgtggccttcccccgtaacatcctgcattactaccgtcatctctacagcccatactgcaccggcggcagcggcagcaacagcagcggccacacagaagcaaaggcgaccggatagcaagactctgacaaagcccaagaaatccacagcggcggcagcagcaggaggaggagcgctgcgtctggcgcccaacgaacccgtatcgacccgcgagcttagaaacaggatttttcccactctgtatgctatatttcaacagagcaggggccaagaacaagagctgaaaataaaaaacaggtctctgcgatccctcacccgcagctgcctgtatcacaaaagcgaagatcagcttcggcgcacgctggaagacgcggaggctctcttcagtaaatactgcgcgctgactcttaaggactagaataaaagatctttattttcattagatctgtgtgttggttttttgtgtggcggccgccgtttgtgttatgtttcaacgtgtttatttttcaattgcagaaaatttcaagtcatttttcattcagtagtatagccccaccaccacatagcttatacagatcaccgtaccttaatcaaactcacagaaccctagtattcaacctgccacctccctcccaacacacagagtacacagtcctttctccccggctggccttaaaaagcatcatatcatgggtaacagacatattcttaggtgttatattccacacggtttcctgtcgagccaaacgctcatcagtgatattaataaactccccgggcagctcacttaagttcatgtcgctgtccagctgctgagccacaggctgctgtccaacttgcggttgcttaacgggcggcgaaggagaagtccacgcctacatgggggtagagtcataatcgtgcatcaggatagggcggtggtgctgcagcagcgcgcgaataaactgctgccgccgccgctccgtcctgcaggaatacaacatggcagtggtctcctcagcgatgattcgcaccgcccgcagcataaggcgccttgtcctccgggcacagcagcgcaccctgatctcacttaaatcagcacagtaactgcagcacagcaccacaatattgttcaaaatcccacagtgcaaggcgctgtatccaaagctcatggcggggaccacagaacccacgtggccatcataccacaagcgcaggtagattaagtggcgacccctcataaacacgctggacataaacattacctcttttggcatgttgtaattcaccacctcccggtaccatataaacctctgattaaacatggcgccatccaccaccatcctaaaccagctggccaaaacctgcccgccggctatacactgcagggaaccgggactggaacaatgacagtggagagcccaggactcgtaaccatggatcatcatgctcgtcatgatatcaatgttggcacaacacaggcacacgtgcatacacttcctcaggattacaagctcctcccgcgttagaaccatatcccagggaacaacccattcctgaatcagcgtaaatcccacactgcagggaagacctcgcacgtaactcacgttgtgcattgtcaaagtgttacattcgggcagcagcggatgatcctccagtatggtagcgcgggtttctgtctcaaaaggaggtagacgatccctactgtacggagtgcgccgagacaaccgagatcgtgttggtcgtagtgtcatgccaaatggaacgccggacgtagtcatatttcctgaagcaaaaccaggtgcgggcgtgacaaacagatctgcgtctccggtctcgccgcttagatcgctctgtgtagtagttgtagtatatccactctctcaaagcatccaggcgccccctggcttcgggttctatgtaaactccttcatgcgccgctgccctgataacatccaccaccgcagaataagccacacccagccaacctacacattcgttctgcgagtcacacacgggaggagcgggaagagctggaagaaccatgtttttttttttattccaaaagattatccaaaacctcaaaatgaagatctattaagtgaacgcgctcccctccggtggcgtggtcaaactctacagccaaagaacagataatggcatttgtaagatgttgcacaatggcttccaaaaggcaaacggccctcacgtccaagtggacgtaaaggctaaacccttcagggtgaatctcctctataaacattccagcaccttcaaccatgcccaaataattctcatctcgccaccttctcaatatatctctaagcaaatcccgaatattaagtccggccattgtaaaaatctgctccagagcgccctccaccttcagcctcaagcagcgaatcatgattgcaaaaattcaggttcctcacagacctgtataagattcaaaagcggaacattaacaaaaataccgcgatcccgtaggtcccttcgcagggccagctgaacataatcgtgcaggtctgcacggaccagcgcggccacttccccgccaggaaccatgacaaaagaacccacactgattatgacacgcatactcggagctatgctaaccagcgtagccccgatgtaagcttgttgcatgggcggcgatataaaatgcaaggtgctgctcaaaaaatcaggcaaagcctcgcgcaaaaaagaaagcacatcgtagtcatgctcatgcagataaaggcaggtaagctccggaaccaccacagaaaaagacaccatttttctctcaaacatgtctgcgggtttctgcataaacacaaaataaaataacaaaaaaacatttaaacattagaagcctgtcttacaacaggaaaaacaacccttataagcataagacggactacggccatgccggcgtgaccgtaaaaaaactggtcaccgtgattaaaaagcaccaccgacagctcctcggtcatgtccggagtcataatgtaagactcggtaaacacatcaggttgattcacatcggtcagtgctaaaaagcgaccgaaatagcccgggggaatacatacccgcaggcgtagagacaacattacagcccccataggaggtataacaaaattaataggagagaaaaacacataaacacctgaaaaaccctcctgcctaggcaaaatagcaccctcccgctccagaacaacatacagcgcttccacagcggcagccataacagtcagccttaccagtaaaaaagaaaacctattaaaaaaacaccactcgacacggcaccagctcaatcagtcacagtgtaaaaaagggccaagtgcagagcgagtatatataggactaaaaaatgacgtaacggttaaagtccacaaaaaacacccagaaaaccgcacgcgaacctacgcccagaaacgaaagccaaaaaacccacaacttcctcaaatcgtcacttccgttttcccacgttacgtcacttcccattttaagaaaactacaattcccaacacatacaagttactccgcccttaat

SEQ ID NO: 129 - DNA, 8680 bp, synthetic construct
  source 1..8680: mol_type = other DNA
cagtactcatatgttgacaattaatcatcggcatagtatatcggcatagtataatacgactcactataggagggccaccaaggtgaggaactaaaccatgagccatattcaacgggaaacgtcgaggccgcgattaaattccaacatggatgctgatttatatgggtataaatgggctcgcgataatgtcgggcaatcaggtgcgacaatctatcgcttgtatgggaagcccgatgcgccagagttgtttctgaaacatggcaaaggtagcgttgccaatgatgttacagatgagatggtcagactaaactggctgacggaatttatgccacttccgaccatcaagcattttatccgtactcctgatgatgcatggttactcaccactgcgatccccggaaaaacagcgttccaggtattagaagaatatcctgattcaggtgaaaatattgttgatgcgctggcagtgttcctgcgccggttgcactcgattcctgtttgtaattgtccttttaacagcgatcgcgtatttcgcctcgctcaggcgcaatcacgaatgaataacggtttggttgatgcgagtgattttgatgacgagcgtaatggctggcctgttgaacaagtctggaaagaaatgcataaacttttgccattctcaccggattcagtcgtcactcatggtgatttctcacttgataaccttatttttgacgaggggaaattaataggttgtattgatgttggacgagtcggaatcgcagaccgataccaggatcttgccatcctatggaactgcctcggtgagttttctccttcattacagaaacggctttttcaaaaatatggtattgataatcctgatatgaataaattgcagtttcatttgatgctcgatgagtttttctaataaaaacccgcttcggcgggtttttttatgcatgtgagcaaaaggccagcaaaaggccaggaaccgtaaaaaggccgcgttgctggcgtttttccataggctccgcccccctgacgagcatcacaaaaatcgacgctcaagtcagaggtggcgaaacccgacaggactataaagataccaggcgtttccccctggaagctccctcgtgcgctctcctgttccgaccctgccgcttaccggatacctgtccgcctttctcccttcgggaagcgtggcgctttctcatagctcacgctgtaggtatctcagttcggtgtaggtcgttcgctccaagctgggctgtgtgcacgaaccccccgttcagcccgaccgctgcgccttatccggtaactatcgtcttgagtccaacccggtaagacacgacttatcgccactggcagcagccactggtaacaggattagcagagcgaggtatgtaggcggtgctacagagttcttgaagtggtggcctaactacggctacactagaagaacagtatttggtatctgcgctctgctgaagccagttaccttcggaaaaagagttggtagctcttgatccggcaaacaaaccaccgctggtagcggtggtttttttgtttgcaagcagcagattacgcgcagaaaaaaaggatctcaagaagatcctttgatcttttctacggggtctgacgctcagtggaacgaaaactcacgttaagggattttggtcatgtcgaggccgccacacaaaaaaccaacacacagatctaatgaaaataaagatcttttattctagtccttcagggtcagggcgcaatacttgctaaacagagcctcggcatcttccagtgtccttctcagctggtcctcgctcttgtggtacaggcagcttctggtcaggcttctcaggctcctgttcttgatcttcagctcctgctcctggcccctgctctgctgaaagatggcgtacagggtgggaaaaatcctgtttctcagctccctggtgctcacgggctcgttgggggccagtctcagggctccgccccctgcggcagcggcggcggtgcttttcttgggcttggtcagggtcttgctatcaggtctcctctgcttctgggtggcagctgctgttgctgcagctgcggcgggggcggtgtgggcggccctggtgccggtggtgtcccatctcctgttgggtcttctcacgggcagggcggggggggcctggggggcggaggtggtggccatgctggagccggtggcgctcttctggggggcggggctggggaaggccacggaggggctgggggtctcgtcgctcacctcctccacctcgctggcttcctcgtccaggctctcccagtcttccatcatgtcctcctcctcctcgtccagcacctcctcggcctggctgtcccagtattcctcctcgtcggtggggggggggggcagctgcagcttcttcttgggggccatcctgggaagcaagggcccgcggctgctgctgatagggctgcggcggctgtgttctggcggcaaacccgttgcgaaaaagaacgcgttattcgccagctctgcttatatagacctcccaccgtacacgcctaccgcccatttgcgtcaatggggcggagttgttacgacattttggaaagtcccgttgattttggtgccaaaacaaactcccattgacgtcaatggggtggagacttggaaatccccgtgagtcaaaccgctatccacgcccattgatgtactgccaaaaccgcatcaccatggtaatagcgatgactaatacgtagatgtactgccaagtaggaaagtcccataaggtcatgtactgggcataatgccaggcgggccatttaccgtcattgacgtcaatagggggcgtacttggcatatgatacacttgatgtactgccaagtgggcagtttaccgtaaatactccacccattgacgtcaatggaaagtccctattggcgttactatgggaacatacgtcattattgacgtcaatgggcgggggtcgttgggcggtcagccaggcgggccatttaccgtaagttatgtaacgcggaactccatatatgggctatgaactaatgaccccgtaattgattactattaataactagtcaataatcaatgtcagttcgacgttaattcgagctcggtacctcgcgaatacatctagatatcggatccgatttaattaagggcggagtaacttgtatgtgttgggaattgtagttttcttaaaatgggaagtgacgtaacgtgtgtgtcagttagggtgtggaaagtccccaggctccccagcaggcagaagtatgcaaagcatgcatctcaattagtcagcaaccaggtgtggaaagtccccaggctccccagcaggcagaagtatgcaaagcatgcatctcaattagtcagcaaccatagtcccgcccctaactccgcccatcccgcccctaactccgcccagttccgcccattctccgccccatggctgactaattttttttatttatgcagaggccgaggccgcctcggcctctgagctattccagaagtagtgaggaggcttttttggaggcctaggcttttgcaaatgccaccatggttcttccagctcttcccgctcctcccgtgtgtgactcgcagaacgaatgtgtaggttggctgggtgtggcttattctgcggtggtggatgttatcagggcagcggcgcatgaaggagtttacatagaacccgaagccagggggcgcctggatgctttgagagagtggatatactacaactactacacagagcgatctaagcggcgagaccggagacgcagatctgtttgtcacgcccgcacctggttttgcttcaggaaatatgactacgtccggcgttccatttggcatgacactacgaccaacacgatctcggttgtctcggcgcactccgtacagtagggatcgtctacctccttttgagacagaaacccgcgctaccatactggaggatcatccgctgctgcccgaatgtaacactttgacaatgcacaacgtgagttacgtgcgaggtcttccctgcagtgtgggatttacgctgattcaggaatgggttgttccctgggatatggttctaacgcgggaggagcttgtaatcctgaggaagtgtatgcacgtgtgcctgtgttgtgccaacattgatatcatgacgagcatgatgatccatggttacgagtcctgggctctccactgtcattgttccagtcccggttccctgcagtgtatagccggcgggcaggttttggccagctggtttaggatggtggtggatggcgccatgtttaatcagaggtttatatggtaccgggaggtggtgaattacaacatgccaaaagaggtaatgtttatgtccagcgtgtttatgaggggtcgccacttaatctacctgcgcttgtggtatgatggccacgtgggttctgtggtccccgccatgagctttggatacagcgccttgcactgtgggattttgaacaatattgtggtgctgtgctgcagttactgtgctgatttaagtgagatcagggtgcgctgctgtgcccggaggacaaggcgccttatgctgcgggcggtgcgaatcatcgctgaggagaccactgccatgttgtattcctgcaggacggagcggcggcggcagcagtttattcgcgcgctgctgcagcaccaccgccctatcctgatgcacgattatgactctacccccatgtaaataaatatctttattttcattacatctgtgtgttggttttttgtgtggcggccaacaagctttaccctatccgtagatgtacctggacatccaggtgatgccggcggcggtggtggaggcgcgcggaaagtcgcggacgcggttccagatgttgcgcagcggcaaaaagtgctccatggtcgggacgctctggccggtgaggcgtgcgcagtcgttgacgctctagaccgtgcaaaaggagagcctgtaagcgggcactcttccgtggtctggtggataaattcgcaagggtatcatggcggacgaccggggttcgaaccccggatccggccgtccgccgtgatccatgcggttaccgcccgcgtgtcgaacccaggtgtgcgacgtcagacaacgggggagcgctccttttggcttccttccaggcgcggcggctgctgcgctagcttttttggccactggccgcgcgcggcgtaagcggttaggctggaaagcgaaagcattaagtggctcgctccctgtagccggagggttattttccaagggttgagtcgcaggacccccggttcgagtctcgggccggccggactgcggcgaacgggggtttgcctccccgtcatgcaagaccccgcttgcaaattcctccggaaacagggacgagccccttttttgcttttcccagatgcatccggtgctgcggcagatgcgcccccctcctcagcagcggcaagagcaagagcagcggcagacatgcagggcaccctccccttctcctaccgcgtcaggaggggcaacatcgatccagacatgataagatacattgatgagtttggacaaaccacaactagaatgcagtgaaaaaaatgctttatttgtgaaatttgtgatgctattgctttatttgtaaccattataagctgcaataaacaagtttgtacactctcgggtgattatttacccccacccttgccgtctgcgccgtttaaaaatcaaaggggttctgccgcgcatcgctatgcgccactggcagggacacgttgcgatactggtgtttagtgctccacttaaactcaggcacaaccatccgcggcagctcggtgaagttttcactccacaggctgcgcaccatcaccaacgcgtttagcaggtcgggcgccgatatcttgaagtcgcagttggggcctccgccctgcgcgcgcgagttgcgatacacagggttgcagcactggaacactatcagcgccgggtggtgcacgctggccagcacgctcttgtcggagatcagatccgcgtccaggtcctccgcgttgctcagggcgaacggagtcaactttggtagctgccttcccaaaaagggcgcgtgcccaggctttgagttgcactcgcaccgtagtggcatcaaaaggtgaccgtgcccggtctgggcgttaggatacagcgcctgcataaaagccttgatctgcttaaaagccacctgagcctttgcgccttcagagaagaacatgccgcaagacttgccggaaaactgattggccggacaggccgcgtcgtgcacgcagcaccttgcgtcggtgttggagatctgcaccacatttcggccccaccggttcttcacgatcttggccttgctagactgctccttcagcgcgcgctgcccgttttcgctcgtcacatccatttcaatcacgtgctccttatttatcataatgcttccgtgtagacacttaagctcgccttcgatctcagcgcagcggtgcagccacaacgcgcagcccgtgggctcgtgatgcttgtaggtcacctctgcaaacgactgcaggtacgcctgcaggaatcgccccatcatcgtcacaaaggtcttgttgctggtgaaggtcagctgcaacccgcggtgctcctcgttcagccaggtcttgcatacggccgccagagcttccacttggtcaggcagtagtttgaagttcgcctttagatcgttatccacgtggtacttgtccatcagcgcgcgcgcagcctccatgcccttctcccacgcagacacgatcggcacactcagcgggttcatcaccgtaatttcactttccgcttcgctgggctcttcctcttcctcttgcgtccgcataccacgcgccactgggtcgtcttcattcagccgccgcactgtgcgcttacctcctttgccatgcttgattagcaccggtgggttgctgaaacccaccatttgtagcgccacatcttctctttcttcctcgctgtccacgattacctctggtgatggcgggcgctcgggcttgggagaagggcgcttctttttcttcttgggcgcaatggccaaatccgccgccgaggtcgatggccgcgggctgggtgtgcgcggcaccagcgcgtcttgtgatgagtcttcctcgtcctcggactcgatacgccgcctcatccgcttttttgggggcgcccggggaggcggcggcgacggggacggggacgacacgtcctccatggttgggggacgtcgcgccgcaccgcgtccgcgctcgggggtggtttcgcgctgctcctcttcccgactggccatttccttctcctataggcagaaaaagatccacaaaagcgaagatcagcttcggcgcacgctggaagacgcggaggctctcttcagtaaatactgcgcgctgactcttaaggactagtttcgcgccctttctcaaatttaagcgcgaaaactacgtcatctccagcggccacacccggcgccagcacctgttgtcagcgccattggcgcgccggccggccgaatatcttcatttaaatgattaggttctacgaagaccaatcccgcccgcctaatgcggagcttaccgcctgcgtcattacccagggccacattcttggccaattgcaagccatcaacaaagcccgccaagagtttctgctacgaaagggacggggggtttacttggacccccagtccggcgaggagctcaacccaatccccccgccgccgcagccctatcagcagcagccgcgggcccttgcttcccaggatggcacccaaaaagaagctgcagctgccgccgccacccacggacgaggaggaatactgggacagtcaggcagaggaggttttggacgaggaggaggaggacatgatggaagactgggagagcctagacgaggaagcttccgaggtcgaagaggtgtcagacgaaacaccgtcaccctcggtcgcattcccctcgccggcgccccagaaatcggcaaccggttccagcatggctacaacctccgctcctcaggcgccgccggcactgcccgttcgccgacccaaccgtagatgggacaccactggaaccagggccggtaagtccaagcagccgccgccgttagcccaagagcaacaacagcgccaaggctaccgctcatggcgcgggcacaagaacgccatagttgcttgcttgcaagactgtgggggcaacatctccttcgcccgccgctttcttctctaccatcacggcgtggccttcccccgtaacatcctgcattactaccgtcatctctacagcccatactgcaccggcggcagcggcagcaacagcagcggccacacagaagcaaaggcgaccggatagcaagactctgacaaagcccaagaaatccacagcggcggcagcagcaggaggaggagcgctgcgtctggcgcccaacgaacccgtatcgacccgcgagcttagaaacaggatttttcccactctgtatgctatatttcaacagagcaggggccaagaacaagagctgaaaataaaaaacaggtctctgcgatccctcacccgcagctgcctgtatcacaaaagcgaagatcagcttcggcgcacgctggaagacgcggaggctctcttcagtaaatactgcgcgctgactcttaaggactagaataaaagatctttattttcattagatctgtgtgttggttttttgtgtggcggcc

SEQ ID NO: 130 - DNA, 8680 bp, synthetic construct
  source 1..8680: mol_type = other DNA
cagtactcatatgttgacaattaatcatcggcatagtatatcggcatagtataatacgactcactataggagggccaccaaggtgaggaactaaaccatgagccatattcaacgggaaacgtcgaggccgcgattaaattccaacatggatgctgatttatatgggtataaatgggctcgcgataatgtcgggcaatcaggtgcgacaatctatcgcttgtatgggaagcccgatgcgccagagttgtttctgaaacatggcaaaggtagcgttgccaatgatgttacagatgagatggtcagactaaactggctgacggaatttatgccacttccgaccatcaagcattttatccgtactcctgatgatgcatggttactcaccactgcgatccccggaaaaacagcgttccaggtattagaagaatatcctgattcaggtgaaaatattgttgatgcgctggcagtgttcctgcgccggttgcactcgattcctgtttgtaattgtccttttaacagcgatcgcgtatttcgcctcgctcaggcgcaatcacgaatgaataacggtttggttgatgcgagtgattttgatgacgagcgtaatggctggcctgttgaacaagtctggaaagaaatgcataaacttttgccattctcaccggattcagtcgtcactcatggtgatttctcacttgataaccttatttttgacgaggggaaattaataggttgtattgatgttggacgagtcggaatcgcagaccgataccaggatcttgccatcctatggaactgcctcggtgagttttctccttcattacagaaacggctttttcaaaaatatggtattgataatcctgatatgaataaattgcagtttcatttgatgctcgatgagtttttctaataaaaacccgcttcggcgggtttttttatgcatgtgagcaaaaggccagcaaaaggccaggaaccgtaaaaaggccgcgttgctggcgtttttccataggctccgcccccctgacgagcatcacaaaaatcgacgctcaagtcagaggtggcgaaacccgacaggactataaagataccaggcgtttccccctggaagctccctcgtgcgctctcctgttccgaccctgccgcttaccggatacctgtccgcctttctcccttcgggaagcgtggcgctttctcatagctcacgctgtaggtatctcagttcggtgtaggtcgttcgctccaagctgggctgtgtgcacgaaccccccgttcagcccgaccgctgcgccttatccggtaactatcgtcttgagtccaacccggtaagacacgacttatcgccactggcagcagccactggtaacaggattagcagagcgaggtatgtaggcggtgctacagagttcttgaagtggtggcctaactacggctacactagaagaacagtatttggtatctgcgctctgctgaagccagttaccttcggaaaaagagttggtagctcttgatccggcaaacaaaccaccgctggtagcggtggtttttttgtttgcaagcagcagattacgcgcagaaaaaaaggatctcaagaagatcctttgatcttttctacggggtctgacgctcagtggaacgaaaactcacgttaagggattttggtcatgtcgaactgacattgattattgactagttattaatagtaatcaattacggggtcattagttcatagcccatatatggagttccgcgttacataacttacggtaaatggcccgcctggctgaccgcccaacgacccccgcccattgacgtcaataatgacgtatgttcccatagtaacgccaatagggactttccattgacgtcaatgggtggagtatttacggtaaactgcccacttggcagtacatcaagtgtatcatatgccaagtacgccccctattgacgtcaatgacggtaaatggcccgcctggcattatgcccagtacatgaccttatgggactttcctacttggcagtacatctacgtattagtcatcgctattaccatggtgatgcggttttggcagtacatcaatgggcgtggatagcggtttgactcacggggatttccaagtctccaccccattgacgtcaatgggagtttgttttggcaccaaaatcaacgggactttccaaaatgtcgtaacaactccgccccattgacgcaaatgggcggtaggcgtgtacggtgggaggtctatataagcagagctggcgaataacgcgttctttttcgcaacgggtttgccgccagaacacagccgccgcagccctatcagcagcagccgcgggcccttgcttcccaggatggcccccaagaagaagctgcagctgccccccccccccaccgacgaggaggaatactgggacagccaggccgaggaggtgctggacgaggaggaggaggacatgatggaagactgggagagcctggacgaggaagccagcgaggtggaggaggtgagcgacgagacccccagcccctccgtggccttccccagccccgccccccagaagagcgccaccggctccagcatggccaccacctccgccccccaggccccccccgccctgcccgtgagaagacccaacaggagatgggacaccaccggcaccagggccgcccacaccgcccccgccgcagctgcagcaacagcagctgccacccagaagcagaggagacctgatagcaagaccctgaccaagcccaagaaaagcaccgccgccgctgccgcagggggcggagccctgagactggcccccaacgagcccgtgagcaccagggagctgagaaacaggatttttcccaccctgtacgccatctttcagcagagcaggggccaggagcaggagctgaagatcaagaacaggagcctgagaagcctgaccagaagctgcctgtaccacaagagcgaggaccagctgagaaggacactggaagatgccgaggctctgtttagcaagtattgcgccctgaccctgaaggactagaataaaagatctttattttcattagatctgtgtgttggttttttgtgtggcggcctcgacgttaattcgagctcggtacctcgcgaatacatctagatatcggatccgatttaattaagggcggagtaacttgtatgtgttgggaattgtagttttcttaaaatgggaagtgacgtaacgtgtgtgtcagttagggtgtggaaagtccccaggctccccagcaggcagaagtatgcaaagcatgcatctcaattagtcagcaaccaggtgtggaaagtccccaggctccccagcaggcagaagtatgcaaagcatgcatctcaattagtcagcaaccatagtcccgcccctaactccgcccatcccgcccctaactccgcccagttccgcccattctccgccccatggctgactaattttttttatttatgcagaggccgaggccgcctcggcctctgagctattccagaagtagtgaggaggcttttttggaggcctaggcttttgcaaatgccaccatggttcttccagctcttcccgctcctcccgtgtgtgactcgcagaacgaatgtgtaggttggctgggtgtggcttattctgcggtggtggatgttatcagggcagcggcgcatgaaggagtttacatagaacccgaagccagggggcgcctggatgctttgagagagtggatatactacaactactacacagagcgatctaagcggcgagaccggagacgcagatctgtttgtcacgcccgcacctggttttgcttcaggaaatatgactacgtccggcgttccatttggcatgacactacgaccaacacgatctcggttgtctcggcgcactccgtacagtagggatcgtctacctccttttgagacagaaacccgcgctaccatactggaggatcatccgctgctgcccgaatgtaacactttgacaatgcacaacgtgagttacgtgcgaggtcttccctgcagtgtgggatttacgctgattcaggaatgggttgttccctgggatatggttctaacgcgggaggagcttgtaatcctgaggaagtgtatgcacgtgtgcctgtgttgtgccaacattgatatcatgacgagcatgatgatccatggttacgagtcctgggctctccactgtcattgttccagtcccggttccctgcagtgtatagccggcgggcaggttttggccagctggtttaggatggtggtggatggcgccatgtttaatcagaggtttatatggtaccgggaggtggtgaattacaacatgccaaaagaggtaatgtttatgtccagcgtgtttatgaggggtcgccacttaatctacctgcgcttgtggtatgatggccacgtgggttctgtggtccccgccatgagctttggatacagcgccttgcactgtgggattttgaacaatattgtggtgctgtgctgcagttactgtgctgatttaagtgagatcagggtgcgctgctgtgcccggaggacaaggcgccttatgctgcgggcggtgcgaatcatcgctgaggagaccactgccatgttgtattcctgcaggacggagcggcggcggcagcagtttattcgcgcgctgctgcagcaccaccgccctatcctgatgcacgattatgactctacccccatgtaaataaatatctttattttcattacatctgtgtgttggttttttgtgtggcggccaacaagctttaccctatccgtagatgtacctggacatccaggtgatgccggcggcggtggtggaggcgcgcggaaagtcgcggacgcggttccagatgttgcgcagcggcaaaaagtgctccatggtcgggacgctctggccggtgaggcgtgcgcagtcgttgacgctctagaccgtgcaaaaggagagcctgtaagcgggcactcttccgtggtctggtggataaattcgcaagggtatcatggcggacgaccggggttcgaaccccggatccggccgtccgccgtgatccatgcggttaccgcccgcgtgtcgaacccaggtgtgcgacgtcagacaacgggggagcgctccttttggcttccttccaggcgcggcggctgctgcgctagcttttttggccactggccgcgcgcggcgtaagcggttaggctggaaagcgaaagcattaagtggctcgctccctgtagccggagggttattttccaagggttgagtcgcaggacccccggttcgagtctcgggccggccggactgcggcgaacgggggtttgcctccccgtcatgcaagaccccgcttgcaaattcctccggaaacagggacgagccccttttttgcttttcccagatgcatccggtgctgcggcagatgcgcccccctcctcagcagcggcaagagcaagagcagcggcagacatgcagggcaccctccccttctcctaccgcgtcaggaggggcaacatcgatccagacatgataagatacattgatgagtttggacaaaccacaactagaatgcagtgaaaaaaatgctttatttgtgaaatttgtgatgctattgctttatttgtaaccattataagctgcaataaacaagtttgtacactctcgggtgattatttacccccacccttgccgtctgcgccgtttaaaaatcaaaggggttctgccgcgcatcgctatgcgccactggcagggacacgttgcgatactggtgtttagtgctccacttaaactcaggcacaaccatccgcggcagctcggtgaagttttcactccacaggctgcgcaccatcaccaacgcgtttagcaggtcgggcgccgatatcttgaagtcgcagttggggcctccgccctgcgcgcgcgagttgcgatacacagggttgcagcactggaacactatcagcgccgggtggtgcacgctggccagcacgctcttgtcggagatcagatccgcgtccaggtcctccgcgttgctcagggcgaacggagtcaactttggtagctgccttcccaaaaagggcgcgtgcccaggctttgagttgcactcgcaccgtagtggcatcaaaaggtgaccgtgcccggtctgggcgttaggatacagcgcctgcataaaagccttgatctgcttaaaagccacctgagcctttgcgccttcagagaagaacatgccgcaagacttgccggaaaactgattggccggacaggccgcgtcgtgcacgcagcaccttgcgtcggtgttggagatctgcaccacatttcggccccaccggttcttcacgatcttggccttgctagactgctccttcagcgcgcgctgcccgttttcgctcgtcacatccatttcaatcacgtgctccttatttatcataatgcttccgtgtagacacttaagctcgccttcgatctcagcgcagcggtgcagccacaacgcgcagcccgtgggctcgtgatgcttgtaggtcacctctgcaaacgactgcaggtacgcctgcaggaatcgccccatcatcgtcacaaaggtcttgttgctggtgaaggtcagctgcaacccgcggtgctcctcgttcagccaggtcttgcatacggccgccagagcttccacttggtcaggcagtagtttgaagttcgcctttagatcgttatccacgtggtacttgtccatcagcgcgcgcgcagcctccatgcccttctcccacgcagacacgatcggcacactcagcgggttcatcaccgtaatttcactttccgcttcgctgggctcttcctcttcctcttgcgtccgcataccacgcgccactgggtcgtcttcattcagccgccgcactgtgcgcttacctcctttgccatgcttgattagcaccggtgggttgctgaaacccaccatttgtagcgccacatcttctctttcttcctcgctgtccacgattacctctggtgatggcgggcgctcgggcttgggagaagggcgcttctttttcttcttgggcgcaatggccaaatccgccgccgaggtcgatggccgcgggctgggtgtgcgcggcaccagcgcgtcttgtgatgagtcttcctcgtcctcggactcgatacgccgcctcatccgcttttttgggggcgcccggggaggcggcggcgacggggacggggacgacacgtcctccatggttgggggacgtcgcgccgcaccgcgtccgcgctcgggggtggtttcgcgctgctcctcttcccgactggccatttccttctcctataggcagaaaaagatccacaaaagcgaagatcagcttcggcgcacgctggaagacgcggaggctctcttcagtaaatactgcgcgctgactcttaaggactagtttcgcgccctttctcaaatttaagcgcgaaaactacgtcatctccagcggccacacccggcgccagcacctgttgtcagcgccattggcgcgccggccggccgaatatcttcatttaaatgattaggttctacgaagaccaatcccgcccgcctaatgcggagcttaccgcctgcgtcattacccagggccacattcttggccaattgcaagccatcaacaaagcccgccaagagtttctgctacgaaagggacggggggtttacttggacccccagtccggcgaggagctcaacccaatccccccgccgccgcagccctatcagcagcagccgcgggcccttgcttcccaggatggcacccaaaaagaagctgcagctgccgccgccacccacggacgaggaggaatactgggacagtcaggcagaggaggttttggacgaggaggaggaggacatgatggaagactgggagagcctagacgaggaagcttccgaggtcgaagaggtgtcagacgaaacaccgtcaccctcggtcgcattcccctcgccggcgccccagaaatcggcaaccggttccagcatggctacaacctccgctcctcaggcgccgccggcactgcccgttcgccgacccaaccgtagatgggacaccactggaaccagggccggtaagtccaagcagccgccgccgttagcccaagagcaacaacagcgccaaggctaccgctcatggcgcgggcacaagaacgccatagttgcttgcttgcaagactgtgggggcaacatctccttcgcccgccgctttcttctctaccatcacggcgtggccttcccccgtaacatcctgcattactaccgtcatctctacagcccatactgcaccggcggcagcggcagcaacagcagcggccacacagaagcaaaggcgaccggatagcaagactctgacaaagcccaagaaatccacagcggcggcagcagcaggaggaggagcgctgcgtctggcgcccaacgaacccgtatcgacccgcgagcttagaaacaggatttttcccactctgtatgctatatttcaacagagcaggggccaagaacaagagctgaaaataaaaaacaggtctctgcgatccctcacccgcagctgcctgtatcacaaaagcgaagatcagcttcggcgcacgctggaagacgcggaggctctcttcagtaaatactgcgcgctgactcttaaggactagaataaaagatctttattttcattagatctgtgtgttggttttttgtgtggcggcc

SEQ ID NO: 131 - DNA, 8339 bp, synthetic construct
  source 1..8339: mol_type = other DNA
cagtactcatatgttgacaattaatcatcggcatagtatatcggcatagtataatacgactcactataggagggccaccaaggtgaggaactaaaccatgagccatattcaacgggaaacgtcgaggccgcgattaaattccaacatggatgctgatttatatgggtataaatgggctcgcgataatgtcgggcaatcaggtgcgacaatctatcgcttgtatgggaagcccgatgcgccagagttgtttctgaaacatggcaaaggtagcgttgccaatgatgttacagatgagatggtcagactaaactggctgacggaatttatgccacttccgaccatcaagcattttatccgtactcctgatgatgcatggttactcaccactgcgatccccggaaaaacagcgttccaggtattagaagaatatcctgattcaggtgaaaatattgttgatgcgctggcagtgttcctgcgccggttgcactcgattcctgtttgtaattgtccttttaacagcgatcgcgtatttcgcctcgctcaggcgcaatcacgaatgaataacggtttggttgatgcgagtgattttgatgacgagcgtaatggctggcctgttgaacaagtctggaaagaaatgcataaacttttgccattctcaccggattcagtcgtcactcatggtgatttctcacttgataaccttatttttgacgaggggaaattaataggttgtattgatgttggacgagtcggaatcgcagaccgataccaggatcttgccatcctatggaactgcctcggtgagttttctccttcattacagaaacggctttttcaaaaatatggtattgataatcctgatatgaataaattgcagtttcatttgatgctcgatgagtttttctaataaaaacccgcttcggcgggtttttttatgcatgtgagcaaaaggccagcaaaaggccaggaaccgtaaaaaggccgcgttgctggcgtttttccataggctccgcccccctgacgagcatcacaaaaatcgacgctcaagtcagaggtggcgaaacccgacaggactataaagataccaggcgtttccccctggaagctccctcgtgcgctctcctgttccgaccctgccgcttaccggatacctgtccgcctttctcccttcgggaagcgtggcgctttctcatagctcacgctgtaggtatctcagttcggtgtaggtcgttcgctccaagctgggctgtgtgcacgaaccccccgttcagcccgaccgctgcgccttatccggtaactatcgtcttgagtccaacccggtaagacacgacttatcgccactggcagcagccactggtaacaggattagcagagcgaggtatgtaggcggtgctacagagttcttgaagtggtggcctaactacggctacactagaagaacagtatttggtatctgcgctctgctgaagccagttaccttcggaaaaagagttggtagctcttgatccggcaaacaaaccaccgctggtagcggtggtttttttgtttgcaagcagcagattacgcgcagaaaaaaaggatctcaagaagatcctttgatcttttctacggggtctgacgctcagtggaacgaaaactcacgttaagggattttggtcatgtcgaggccgccacacaaaaaaccaacacacagatctaatgaaaataaagatcttttattctagtccttcagggtcagggcgcaatacttgctaaacagagcctcggcatcttccagtgtccttctcagctggtcctcgctcttgtggtacaggcagcttctggtcaggcttctcaggctcctgttcttgatcttcagctcctgctcctggcccctgctctgctgaaagatggcgtacagggtgggaaaaatcctgtttctcagctccctggtgctcacgggctcgttgggggccagtctcagggctccgccccctgcggcagcggcggcggtgcttttcttgggcttggtcagggtcttgctatcaggtctcctctgcttctgggtggcagctgctgttgctgcagctgcggcgggggcggtgtgggcggccctggtgccggtggtgtcccatctcctgttgggtcttctcacgggcagggcggggggggcctggggggcggaggtggtggccatgctggagccggtggcgctcttctggggggcggggctggggaaggccacggaggggctgggggtctcgtcgctcacctcctccacctcgctggcttcctcgtccaggctctcccagtcttccatcatgtcctcctcctcctcgtccagcacctcctcggcctggctgtcccagtattcctcctcgtcggtggggggggggggcagctgcagcttcttcttgggggccatcctgggaagcaagggcccgcggctgctgctgatagggctgcggcggctgtgttctggcggcaaacccgttgcgaaaaagaacgttcacggcgactactgcacttatatacggttctcccccaccctcgggaaaaaggcggagccagtacacgacatcactttcccagtttaccccgcgccaccttctctaggcaccggttcaattgccgacccctccccccaacttctcggggactgtgggcgatgtgcgctctgcccactgacgggcaccggagccggtaagctccgcattaggcgggcgggattggtcttcgtagaacctaatcatttaaatatctagtcgacgttaattcgagctcggtacctcgcgaatacatctagatatcggatccgatttaattaagggcggagtaacttgtatgtgttgggaattgtagttttcttaaaatgggaagtgacgtaacgtgtgtgtcagttagggtgtggaaagtccccaggctccccagcaggcagaagtatgcaaagcatgcatctcaattagtcagcaaccaggtgtggaaagtccccaggctccccagcaggcagaagtatgcaaagcatgcatctcaattagtcagcaaccatagtcccgcccctaactccgcccatcccgcccctaactccgcccagttccgcccattctccgccccatggctgactaattttttttatttatgcagaggccgaggccgcctcggcctctgagctattccagaagtagtgaggaggcttttttggaggcctaggcttttgcaaatgccaccatggttcttccagctcttcccgctcctcccgtgtgtgactcgcagaacgaatgtgtaggttggctgggtgtggcttattctgcggtggtggatgttatcagggcagcggcgcatgaaggagtttacatagaacccgaagccagggggcgcctggatgctttgagagagtggatatactacaactactacacagagcgatctaagcggcgagaccggagacgcagatctgtttgtcacgcccgcacctggttttgcttcaggaaatatgactacgtccggcgttccatttggcatgacactacgaccaacacgatctcggttgtctcggcgcactccgtacagtagggatcgtctacctccttttgagacagaaacccgcgctaccatactggaggatcatccgctgctgcccgaatgtaacactttgacaatgcacaacgtgagttacgtgcgaggtcttccctgcagtgtgggatttacgctgattcaggaatgggttgttccctgggatatggttctaacgcgggaggagcttgtaatcctgaggaagtgtatgcacgtgtgcctgtgttgtgccaacattgatatcatgacgagcatgatgatccatggttacgagtcctgggctctccactgtcattgttccagtcccggttccctgcagtgtatagccggcgggcaggttttggccagctggtttaggatggtggtggatggcgccatgtttaatcagaggtttatatggtaccgggaggtggtgaattacaacatgccaaaagaggtaatgtttatgtccagcgtgtttatgaggggtcgccacttaatctacctgcgcttgtggtatgatggccacgtgggttctgtggtccccgccatgagctttggatacagcgccttgcactgtgggattttgaacaatattgtggtgctgtgctgcagttactgtgctgatttaagtgagatcagggtgcgctgctgtgcccggaggacaaggcgccttatgctgcgggcggtgcgaatcatcgctgaggagaccactgccatgttgtattcctgcaggacggagcggcggcggcagcagtttattcgcgcgctgctgcagcaccaccgccctatcctgatgcacgattatgactctacccccatgtaaataaatatctttattttcattacatctgtgtgttggttttttgtgtggcggccaacaagctttaccctatccgtagatgtacctggacatccaggtgatgccggcggcggtggtggaggcgcgcggaaagtcgcggacgcggttccagatgttgcgcagcggcaaaaagtgctccatggtcgggacgctctggccggtgaggcgtgcgcagtcgttgacgctctagaccgtgcaaaaggagagcctgtaagcgggcactcttccgtggtctggtggataaattcgcaagggtatcatggcggacgaccggggttcgaaccccggatccggccgtccgccgtgatccatgcggttaccgcccgcgtgtcgaacccaggtgtgcgacgtcagacaacgggggagcgctccttttggcttccttccaggcgcggcggctgctgcgctagcttttttggccactggccgcgcgcggcgtaagcggttaggctggaaagcgaaagcattaagtggctcgctccctgtagccggagggttattttccaagggttgagtcgcaggacccccggttcgagtctcgggccggccggactgcggcgaacgggggtttgcctccccgtcatgcaagaccccgcttgcaaattcctccggaaacagggacgagccccttttttgcttttcccagatgcatccggtgctgcggcagatgcgcccccctcctcagcagcggcaagagcaagagcagcggcagacatgcagggcaccctccccttctcctaccgcgtcaggaggggcaacatcgatccagacatgataagatacattgatgagtttggacaaaccacaactagaatgcagtgaaaaaaatgctttatttgtgaaatttgtgatgctattgctttatttgtaaccattataagctgcaataaacaagtttgtacactctcgggtgattatttacccccacccttgccgtctgcgccgtttaaaaatcaaaggggttctgccgcgcatcgctatgcgccactggcagggacacgttgcgatactggtgtttagtgctccacttaaactcaggcacaaccatccgcggcagctcggtgaagttttcactccacaggctgcgcaccatcaccaacgcgtttagcaggtcgggcgccgatatcttgaagtcgcagttggggcctccgccctgcgcgcgcgagttgcgatacacagggttgcagcactggaacactatcagcgccgggtggtgcacgctggccagcacgctcttgtcggagatcagatccgcgtccaggtcctccgcgttgctcagggcgaacggagtcaactttggtagctgccttcccaaaaagggcgcgtgcccaggctttgagttgcactcgcaccgtagtggcatcaaaaggtgaccgtgcccggtctgggcgttaggatacagcgcctgcataaaagccttgatctgcttaaaagccacctgagcctttgcgccttcagagaagaacatgccgcaagacttgccggaaaactgattggccggacaggccgcgtcgtgcacgcagcaccttgcgtcggtgttggagatctgcaccacatttcggccccaccggttcttcacgatcttggccttgctagactgctccttcagcgcgcgctgcccgttttcgctcgtcacatccatttcaatcacgtgctccttatttatcataatgcttccgtgtagacacttaagctcgccttcgatctcagcgcagcggtgcagccacaacgcgcagcccgtgggctcgtgatgcttgtaggtcacctctgcaaacgactgcaggtacgcctgcaggaatcgccccatcatcgtcacaaaggtcttgttgctggtgaaggtcagctgcaacccgcggtgctcctcgttcagccaggtcttgcatacggccgccagagcttccacttggtcaggcagtagtttgaagttcgcctttagatcgttatccacgtggtacttgtccatcagcgcgcgcgcagcctccatgcccttctcccacgcagacacgatcggcacactcagcgggttcatcaccgtaatttcactttccgcttcgctgggctcttcctcttcctcttgcgtccgcataccacgcgccactgggtcgtcttcattcagccgccgcactgtgcgcttacctcctttgccatgcttgattagcaccggtgggttgctgaaacccaccatttgtagcgccacatcttctctttcttcctcgctgtccacgattacctctggtgatggcgggcgctcgggcttgggagaagggcgcttctttttcttcttgggcgcaatggccaaatccgccgccgaggtcgatggccgcgggctgggtgtgcgcggcaccagcgcgtcttgtgatgagtcttcctcgtcctcggactcgatacgccgcctcatccgcttttttgggggcgcccggggaggcggcggcgacggggacggggacgacacgtcctccatggttgggggacgtcgcgccgcaccgcgtccgcgctcgggggtggtttcgcgctgctcctcttcccgactggccatttccttctcctataggcagaaaaagatccacaaaagcgaagatcagcttcggcgcacgctggaagacgcggaggctctcttcagtaaatactgcgcgctgactcttaaggactagtttcgcgccctttctcaaatttaagcgcgaaaactacgtcatctccagcggccacacccggcgccagcacctgttgtcagcgccattggcgcgccggccggccgaatatcttcatttaaatgattaggttctacgaagaccaatcccgcccgcctaatgcggagcttaccgcctgcgtcattacccagggccacattcttggccaattgcaagccatcaacaaagcccgccaagagtttctgctacgaaagggacggggggtttacttggacccccagtccggcgaggagctcaacccaatccccccgccgccgcagccctatcagcagcagccgcgggcccttgcttcccaggatggcacccaaaaagaagctgcagctgccgccgccacccacggacgaggaggaatactgggacagtcaggcagaggaggttttggacgaggaggaggaggacatgatggaagactgggagagcctagacgaggaagcttccgaggtcgaagaggtgtcagacgaaacaccgtcaccctcggtcgcattcccctcgccggcgccccagaaatcggcaaccggttccagcatggctacaacctccgctcctcaggcgccgccggcactgcccgttcgccgacccaaccgtagatgggacaccactggaaccagggccggtaagtccaagcagccgccgccgttagcccaagagcaacaacagcgccaaggctaccgctcatggcgcgggcacaagaacgccatagttgcttgcttgcaagactgtgggggcaacatctccttcgcccgccgctttcttctctaccatcacggcgtggccttcccccgtaacatcctgcattactaccgtcatctctacagcccatactgcaccggcggcagcggcagcaacagcagcggccacacagaagcaaaggcgaccggatagcaagactctgacaaagcccaagaaatccacagcggcggcagcagcaggaggaggagcgctgcgtctggcgcccaacgaacccgtatcgacccgcgagcttagaaacaggatttttcccactctgtatgctatatttcaacagagcaggggccaagaacaagagctgaaaataaaaaacaggtctctgcgatccctcacccgcagctgcctgtatcacaaaagcgaagatcagcttcggcgcacgctggaagacgcggaggctctcttcagtaaatactgcgcgctgactcttaaggactagaataaaagatctttattttcattagatctgtgtgttggttttttgtgtggcggcc

SEQ ID NO: 132 - DNA, 8339 bp, synthetic construct
  source 1..8339: mol_type = other DNA
cagtactcatatgttgacaattaatcatcggcatagtatatcggcatagtataatacgactcactataggagggccaccaaggtgaggaactaaaccatgagccatattcaacgggaaacgtcgaggccgcgattaaattccaacatggatgctgatttatatgggtataaatgggctcgcgataatgtcgggcaatcaggtgcgacaatctatcgcttgtatgggaagcccgatgcgccagagttgtttctgaaacatggcaaaggtagcgttgccaatgatgttacagatgagatggtcagactaaactggctgacggaatttatgccacttccgaccatcaagcattttatccgtactcctgatgatgcatggttactcaccactgcgatccccggaaaaacagcgttccaggtattagaagaatatcctgattcaggtgaaaatattgttgatgcgctggcagtgttcctgcgccggttgcactcgattcctgtttgtaattgtccttttaacagcgatcgcgtatttcgcctcgctcaggcgcaatcacgaatgaataacggtttggttgatgcgagtgattttgatgacgagcgtaatggctggcctgttgaacaagtctggaaagaaatgcataaacttttgccattctcaccggattcagtcgtcactcatggtgatttctcacttgataaccttatttttgacgaggggaaattaataggttgtattgatgttggacgagtcggaatcgcagaccgataccaggatcttgccatcctatggaactgcctcggtgagttttctccttcattacagaaacggctttttcaaaaatatggtattgataatcctgatatgaataaattgcagtttcatttgatgctcgatgagtttttctaataaaaacccgcttcggcgggtttttttatgcatgtgagcaaaaggccagcaaaaggccaggaaccgtaaaaaggccgcgttgctggcgtttttccataggctccgcccccctgacgagcatcacaaaaatcgacgctcaagtcagaggtggcgaaacccgacaggactataaagataccaggcgtttccccctggaagctccctcgtgcgctctcctgttccgaccctgccgcttaccggatacctgtccgcctttctcccttcgggaagcgtggcgctttctcatagctcacgctgtaggtatctcagttcggtgtaggtcgttcgctccaagctgggctgtgtgcacgaaccccccgttcagcccgaccgctgcgccttatccggtaactatcgtcttgagtccaacccggtaagacacgacttatcgccactggcagcagccactggtaacaggattagcagagcgaggtatgtaggcggtgctacagagttcttgaagtggtggcctaactacggctacactagaagaacagtatttggtatctgcgctctgctgaagccagttaccttcggaaaaagagttggtagctcttgatccggcaaacaaaccaccgctggtagcggtggtttttttgtttgcaagcagcagattacgcgcagaaaaaaaggatctcaagaagatcctttgatcttttctacggggtctgacgctcagtggaacgaaaactcacgttaagggattttggtcatgtcgactagatatttaaatgattaggttctacgaagaccaatcccgcccgcctaatgcggagcttaccggctccggtgcccgtcagtgggcagagcgcacatcgcccacagtccccgagaagttggggggaggggtcggcaattgaaccggtgcctagagaaggtggcgcggggtaaactgggaaagtgatgtcgtgtactggctccgcctttttcccgagggtgggggagaaccgtatataagtgcagtagtcgccgtgaacgttctttttcgcaacgggtttgccgccagaacacagccgccgcagccctatcagcagcagccgcgggcccttgcttcccaggatggcccccaagaagaagctgcagctgccccccccccccaccgacgaggaggaatactgggacagccaggccgaggaggtgctggacgaggaggaggaggacatgatggaagactgggagagcctggacgaggaagccagcgaggtggaggaggtgagcgacgagacccccagcccctccgtggccttccccagccccgccccccagaagagcgccaccggctccagcatggccaccacctccgccccccaggccccccccgccctgcccgtgagaagacccaacaggagatgggacaccaccggcaccagggccgcccacaccgcccccgccgcagctgcagcaacagcagctgccacccagaagcagaggagacctgatagcaagaccctgaccaagcccaagaaaagcaccgccgccgctgccgcagggggcggagccctgagactggcccccaacgagcccgtgagcaccagggagctgagaaacaggatttttcccaccctgtacgccatctttcagcagagcaggggccaggagcaggagctgaagatcaagaacaggagcctgagaagcctgaccagaagctgcctgtaccacaagagcgaggaccagctgagaaggacactggaagatgccgaggctctgtttagcaagtattgcgccctgaccctgaaggactagaataaaagatctttattttcattagatctgtgtgttggttttttgtgtggcggcctcgacgttaattcgagctcggtacctcgcgaatacatctagatatcggatccgatttaattaagggcggagtaacttgtatgtgttgggaattgtagttttcttaaaatgggaagtgacgtaacgtgtgtgtcagttagggtgtggaaagtccccaggctccccagcaggcagaagtatgcaaagcatgcatctcaattagtcagcaaccaggtgtggaaagtccccaggctccccagcaggcagaagtatgcaaagcatgcatctcaattagtcagcaaccatagtcccgcccctaactccgcccatcccgcccctaactccgcccagttccgcccattctccgccccatggctgactaattttttttatttatgcagaggccgaggccgcctcggcctctgagctattccagaagtagtgaggaggcttttttggaggcctaggcttttgcaaatgccaccatggttcttccagctcttcccgctcctcccgtgtgtgactcgcagaacgaatgtgtaggttggctgggtgtggcttattctgcggtggtggatgttatcagggcagcggcgcatgaaggagtttacatagaacccgaagccagggggcgcctggatgctttgagagagtggatatactacaactactacacagagcgatctaagcggcgagaccggagacgcagatctgtttgtcacgcccgcacctggttttgcttcaggaaatatgactacgtccggcgttccatttggcatgacactacgaccaacacgatctcggttgtctcggcgcactccgtacagtagggatcgtctacctccttttgagacagaaacccgcgctaccatactggaggatcatccgctgctgcccgaatgtaacactttgacaatgcacaacgtgagttacgtgcgaggtcttccctgcagtgtgggatttacgctgattcaggaatgggttgttccctgggatatggttctaacgcgggaggagcttgtaatcctgaggaagtgtatgcacgtgtgcctgtgttgtgccaacattgatatcatgacgagcatgatgatccatggttacgagtcctgggctctccactgtcattgttccagtcccggttccctgcagtgtatagccggcgggcaggttttggccagctggtttaggatggtggtggatggcgccatgtttaatcagaggtttatatggtaccgggaggtggtgaattacaacatgccaaaagaggtaatgtttatgtccagcgtgtttatgaggggtcgccacttaatctacctgcgcttgtggtatgatggccacgtgggttctgtggtccccgccatgagctttggatacagcgccttgcactgtgggattttgaacaatattgtggtgctgtgctgcagttactgtgctgatttaagtgagatcagggtgcgctgctgtgcccggaggacaaggcgccttatgctgcgggcggtgcgaatcatcgctgaggagaccactgccatgttgtattcctgcaggacggagcggcggcggcagcagtttattcgcgcgctgctgcagcaccaccgccctatcctgatgcacgattatgactctacccccatgtaaataaatatctttattttcattacatctgtgtgttggttttttgtgtggcggccaacaagctttaccctatccgtagatgtacctggacatccaggtgatgccggcggcggtggtggaggcgcgcggaaagtcgcggacgcggttccagatgttgcgcagcggcaaaaagtgctccatggtcgggacgctctggccggtgaggcgtgcgcagtcgttgacgctctagaccgtgcaaaaggagagcctgtaagcgggcactcttccgtggtctggtggataaattcgcaagggtatcatggcggacgaccggggttcgaaccccggatccggccgtccgccgtgatccatgcggttaccgcccgcgtgtcgaacccaggtgtgcgacgtcagacaacgggggagcgctccttttggcttccttccaggcgcggcggctgctgcgctagcttttttggccactggccgcgcgcggcgtaagcggttaggctggaaagcgaaagcattaagtggctcgctccctgtagccggagggttattttccaagggttgagtcgcaggacccccggttcgagtctcgggccggccggactgcggcgaacgggggtttgcctccccgtcatgcaagaccccgcttgcaaattcctccggaaacagggacgagccccttttttgcttttcccagatgcatccggtgctgcggcagatgcgcccccctcctcagcagcggcaagagcaagagcagcggcagacatgcagggcaccctccccttctcctaccgcgtcaggaggggcaacatcgatccagacatgataagatacattgatgagtttggacaaaccacaactagaatgcagtgaaaaaaatgctttatttgtgaaatttgtgatgctattgctttatttgtaaccattataagctgcaataaacaagtttgtacactctcgggtgattatttacccccacccttgccgtctgcgccgtttaaaaatcaaaggggttctgccgcgcatcgctatgcgccactggcagggacacgttgcgatactggtgtttagtgctccacttaaactcaggcacaaccatccgcggcagctcggtgaagttttcactccacaggctgcgcaccatcaccaacgcgtttagcaggtcgggcgccgatatcttgaagtcgcagttggggcctccgccctgcgcgcgcgagttgcgatacacagggttgcagcactggaacactatcagcgccgggtggtgcacgctggccagcacgctcttgtcggagatcagatccgcgtccaggtcctccgcgttgctcagggcgaacggagtcaactttggtagctgccttcccaaaaagggcgcgtgcccaggctttgagttgcactcgcaccgtagtggcatcaaaaggtgaccgtgcccggtctgggcgttaggatacagcgcctgcataaaagccttgatctgcttaaaagccacctgagcctttgcgccttcagagaagaacatgccgcaagacttgccggaaaactgattggccggacaggccgcgtcgtgcacgcagcaccttgcgtcggtgttggagatctgcaccacatttcggccccaccggttcttcacgatcttggccttgctagactgctccttcagcgcgcgctgcccgttttcgctcgtcacatccatttcaatcacgtgctccttatttatcataatgcttccgtgtagacacttaagctcgccttcgatctcagcgcagcggtgcagccacaacgcgcagcccgtgggctcgtgatgcttgtaggtcacctctgcaaacgactgcaggtacgcctgcaggaatcgccccatcatcgtcacaaaggtcttgttgctggtgaaggtcagctgcaacccgcggtgctcctcgttcagccaggtcttgcatacggccgccagagcttccacttggtcaggcagtagtttgaagttcgcctttagatcgttatccacgtggtacttgtccatcagcgcgcgcgcagcctccatgcccttctcccacgcagacacgatcggcacactcagcgggttcatcaccgtaatttcactttccgcttcgctgggctcttcctcttcctcttgcgtccgcataccacgcgccactgggtcgtcttcattcagccgccgcactgtgcgcttacctcctttgccatgcttgattagcaccggtgggttgctgaaacccaccatttgtagcgccacatcttctctttcttcctcgctgtccacgattacctctggtgatggcgggcgctcgggcttgggagaagggcgcttctttttcttcttgggcgcaatggccaaatccgccgccgaggtcgatggccgcgggctgggtgtgcgcggcaccagcgcgtcttgtgatgagtcttcctcgtcctcggactcgatacgccgcctcatccgcttttttgggggcgcccggggaggcggcggcgacggggacggggacgacacgtcctccatggttgggggacgtcgcgccgcaccgcgtccgcgctcgggggtggtttcgcgctgctcctcttcccgactggccatttccttctcctataggcagaaaaagatccacaaaagcgaagatcagcttcggcgcacgctggaagacgcggaggctctcttcagtaaatactgcgcgctgactcttaaggactagtttcgcgccctttctcaaatttaagcgcgaaaactacgtcatctccagcggccacacccggcgccagcacctgttgtcagcgccattggcgcgccggccggccgaatatcttcatttaaatgattaggttctacgaagaccaatcccgcccgcctaatgcggagcttaccgcctgcgtcattacccagggccacattcttggccaattgcaagccatcaacaaagcccgccaagagtttctgctacgaaagggacggggggtttacttggacccccagtccggcgaggagctcaacccaatccccccgccgccgcagccctatcagcagcagccgcgggcccttgcttcccaggatggcacccaaaaagaagctgcagctgccgccgccacccacggacgaggaggaatactgggacagtcaggcagaggaggttttggacgaggaggaggaggacatgatggaagactgggagagcctagacgaggaagcttccgaggtcgaagaggtgtcagacgaaacaccgtcaccctcggtcgcattcccctcgccggcgccccagaaatcggcaaccggttccagcatggctacaacctccgctcctcaggcgccgccggcactgcccgttcgccgacccaaccgtagatgggacaccactggaaccagggccggtaagtccaagcagccgccgccgttagcccaagagcaacaacagcgccaaggctaccgctcatggcgcgggcacaagaacgccatagttgcttgcttgcaagactgtgggggcaacatctccttcgcccgccgctttcttctctaccatcacggcgtggccttcccccgtaacatcctgcattactaccgtcatctctacagcccatactgcaccggcggcagcggcagcaacagcagcggccacacagaagcaaaggcgaccggatagcaagactctgacaaagcccaagaaatccacagcggcggcagcagcaggaggaggagcgctgcgtctggcgcccaacgaacccgtatcgacccgcgagcttagaaacaggatttttcccactctgtatgctatatttcaacagagcaggggccaagaacaagagctgaaaataaaaaacaggtctctgcgatccctcacccgcagctgcctgtatcacaaaagcgaagatcagcttcggcgcacgctggaagacgcggaggctctcttcagtaaatactgcgcgctgactcttaaggactagaataaaagatctttattttcattagatctgtgtgttggttttttgtgtggcggcc

SEQ ID NO: 133 - DNA, 9290 bp, synthetic construct
  source 1..9290: mol_type = other DNA
ttaattaaaggccttcgaggtgagccccacgttctgcttcactctccccatctcccccccctccccacccccaattttgtatttatttattttttaattattttgtgcagcgatgggggcggggggggggggggggcgcgcgccaggcggggcggggcggggcgaggggcggggcggggcgaggcggagaggtgcggcggcagccaatcagagcggcgcgctccgaaagtttccttttatggcgaggcggcggcggcggcggccctataaaaagcgaagcgcgcggcgggcgcgccggcgcaccgcgggcccgatccaccggtactgttggtaaagccaccatgttttccggtggcggcggcccgctgtcccccggaggaaagtcggcggccagggcggcgtccgggttttttgcgcccgccggccctcgcggagccagccggggacccccgccttgtttgaggcaaaacttttacaacccctacctcgccccagtcgggacgcaacagaagccgaccgggccaacccagcgccatacgtactatagcgaatgcgatgaatttcgattcatcgccccgcgggtgctggacgaggatgcccccccggagaagcgcgccggggtgcacgacggtcacctcaagcgcgcccccaaggtgtactgcgggggggacgagcgcgacgtcctccgcgtcgggtcgggcggcttctggccgcggcgctcgcgcctgtggggcggcgtggaccacgccccggcggggttcaaccccaccgtcaccgtctttcacgtgtacgacatcctggagaacgtggagcacgcgtacggcatgcgcgcggcccagttccacgcgcggtttatggacgccatcacaccgacggggaccgtcatcacgctcctgggcctgactccggaaggccaccgggtggccgttcacgtttacggcacgcggcagtacttttacatgaacaaggaggaggtcgacaggcacctacaatgccgcgccccacgagatctctgcgagcgcatggccgcggccctgcgcgagtccccgggcgcgtcgttccgcggcatctccgcggaccacttcgaggcggaggtggtggagcgcaccgacgtgtactactacgagacgcgccccgctctgttttaccgcgtctacgtccgaagcgggcgcgtgctgtcgtacctgtgcgacaacttctgcccggccatcaagaagtacgagggtggggtcgacgccaccacccggttcatcctggacaaccccgggttcgtcaccttcggctggtaccgtctcaaaccgggccggaacaacacgctagcccagccgcgggccccgatggccttcgggacatccagcgacgtcgagtttaactgtacggcggacaacctggccatcgaggggggcatgagcgacctaccggcatacaagctcatgtgcttcgatatcgaatgcaaggcggggggggaggacgagctggcctttccggtggccgggcacccggaggacctggtcatccagatatcctgtctgctctacgacctgtccaccaccgccctggagcacgtcctcctgttttcgctcggttcctgcgacctccccgaatcccacctgaacgagctggcggccaggggcctgcccacgcccgtggttctggaattcgacagcgaattcgagatgctgttggccttcatgacccttgtgaaacagtacggccccgagttcgtgaccgggtacaacatcatcaacttcgactggcccttcttgctggccaagctgacggacatttacaaggtccccctggacgggtacggccgcatgaacggccggggcgtgtttcgcgtgtgggacataggccagagccacttccagaagcgcagcaagataaaggtgaacggcatggtgaacatcgacatgtacgggattataaccgacaagatcaagctctcgagctacaagctcaacgccgtggccgaagccgtcctgaaggacaagaagaaggacctgagctatcgcgacatccccgcctactacgccgccgggcccgcgcaacgcggggtgatcggcgagtactgcatacaggattccctgctggtgggccagctgttttttaagtttttgccccatctggagctctcggccgtcgcgcgcttggcgggtattaacatcacccgcaccatctacgacggccagcagatccgcgtctttacgtgcctgctgcgcctggccgaccagaagggctttattctgccggacacccaggggcgatttaggggcgccgggggggaggcgcccaagcgtccggccgcagcccgggaggacgaggagcggccagaggaggagggggaggacgaggacgaacgcgaggagggcgggggcgagcgggagccggagggcgcgcgggagaccgccggcaggcacgtggggtaccagggggccagggtccttgaccccacttccgggtttcacgtgaaccccgtggtggtgttcgactttgccagcctgtaccccagcatcatccaggcccacaacctgtgcttcagcacgctctccctgagggccgacgcagtggcgcacctggaggcgggcaaggactacctggagatcgaggtgggggggcgacggctgttcttcgtcaaggctcacgtgcgagagagcctcctcagcatcctcctgcgggactggctcgccatgcgaaagcagatccgctcgcggattccccagagcagccccgaggaggccgtgctcctggacaagcagcaggccgccatcaaggtcgtgtgtaactcggtgtacgggttcacgggagtgcagcacggactcctgccgtgcctgcacgttgccgcgacggtgacgaccatcggccgcgagatgctgctcgcgacccgcgagtacgtccacgcgcgctgggcggccttcgaacagctcctggccgatttcccggaggcggccgacatgcgcgcccccgggccctattccatgcgcatcatctacggggacacggactccatctttgtgctgtgccgcggcctcacggccgccgggctgacggccgtgggcgacaagatggcgagccacatctcgcgcgcgctgtttctgccccccatcaaactcgagtgcgaaaagacgttcaccaagctgctgctgatcgccaagaaaaagtacatcggcgtcatctacgggggtaagatgctcatcaagggcgtggatctggtgcgcaaaaacaactgcgcgtttatcaaccgcacctccagggccctggtcgacctgctgttttacgacgataccgtctccggagccgccgcggcgttagccgagcgccccgcggaggagtggctggcgcgacccctgcccgagggactgcaggcgttcggggccgtcctcgtagacgcccatcggcgcatcaccgacccggagagggacatccaggactttgtcctcaccgccgaactgagcagacacccgcgcgcgtacaccaacaagcgcctggcccacctgacggtgtattacaagctcatggcccgccgcgcgcaggtcccgtccatcaaggaccggatcccgtacgtgatcgtggcccagacccgcgaggtagaggagacggtcgcgcggctggccgccctccgcgagctagacgccgccgccccaggggacgagcccgccccccccgcggccctgccctccccggccaagcgcccccgggagacgccgtcgcctgccgaccccccgggaggcgcgtccaagccccgcaagctgctggtgtccgagctggccgaggatcccgcatacgccattgcccacggcgtcgccctgaacacggactattacttctcccacctgttgggggcggcgtgcgtgacattcaaggccctgtttgggaataacgccaagatcaccgagagtctgttaaaaaggtttattcccgaagtgtggcaccccccggacgacgtggccgcgcggctccggaccgcagggttcggggcggtgggtgccggcgctacggcggaggaaactcgtcgaatgttgcatagagcctttgatactctagcagaattcggcagtggagcaacaaacttctctctgctgaaacaagccggagatgtcgaagagaatcctggaccgacggattcccctggcggtgtggcccccgcctcccccgtggaggacgcgtcggacgcgtccctcgggcagccggaggagggggcgccctgccaggtggtcctgcagggcgccgaacttaatggaatcctacaggcgtttgccccgctgcgcacgagccttctggactcgcttctggttatgggcgaccggggcatccttatccataacacgatctttggggagcaggtgttcctgcccctggaacactcgcaattcagtcggtatcgctggcgcggacccacggcggcgttcctgtctctcgtggaccagaagcgctccctcctgagcgtgtttcgcgccaaccagtacccggacctacgtcgggtggagttggcgatcacgggccaggccccgtttcgcacgctggttcagcgcatatggacgacgacgtccgacggcgaggccgttgagctagccagcgagacgctgatgaagcgcgaactgacgagctttgtggtgctggttccccagggaacccccgacgttcagttgcgcctgacgaggccgcagctcaccaaggtccttaacgcgaccggggccgatagtgccacgcccaccacgttcgagctcggggttaacggcaaattttccgtgttcaccacgagtacctgcgtcacctttgctgcccgcgaggagggcgtgtcgtccagcaccagcacccaggtccagatcctgtccaacgcgctcaccaaggcgggccaggccgccgcgaacgccaagacggtgtacggggaaaatacccatcgcaccttctctgtggtcgtcgacgattgcagcatgcgggcggtgctccggcgactgcaggtcggcgggggcaccctcaagttcttcctcacgacccccgtccccagtctgtgcgtcaccgccaccggtcccaacgcggtatcggcggtatttctcctgaaaccccagaagatttgcctggactggctgggtcatagccaggggtctccttcagccgggagctcggcctcccgggcctctgggagcgagccaacagacagccaggactccgcgtcggacgcggtcagccacggcgatccggaagacctcgatggcgctgcccgggcgggagaggcgggggccttgcatgcctgtccgatgccgtcgtcgaccacgcgggtcactcccacgaccaagcgggggcgctcggggggcgaggatgcgcgcgcggacacggccctaaagaaacctaagacggggtcgcccaccgcacccccgcccgcagatccagtccccctggacacggaggacgactccgatgcggcggacgggacggcggcccgtcccgccgctccagacgcccggagcggaagccgttacgcgtgttactttcgcgacctcccgaccggagaagcaagccccggcgccttctccgccttccgggggggcccccaaaccccgtatggttttggattccccgccacgaacttctctctgttaaagcaagcaggagacgtggaagaaaaccccggtcctatggagacaaagcccaagacggcaaccaccatcaaggtcccccccgggcccctgggatacgtgtacgctcgcgcgtgtccgtccgaaggcatcgagcttctggcgttactgtcggcacgcagcggcgattccgacgtcgccgtggcgcccctggtcgtgggcctgaccgtggagagcggctttgaggccaacgtggccgtggtcgtgggttctcgcacgacggggctcgggggtaccgcggtgtccctgaaactgacgccctcgcactacagctcgtccgtgtacgtctttcacggcggccggcacctggaccccagcacccaggccccgaacctgacgcgactttgcgagcgggcacgccgccattttggcttttcggactacaccccccggcccggcgacctcaaacacgagacgacgggggaggcgctgtgtgagcgcctcggcctggacccggaccgcgccctcctgtatctggtcgttaccgagggcttcaaggaggccgtgtgcatcaacaacacctttctgcacctgggaggctcggacaaggtaaccataggcggggcggaggtgcaccgcatacccgtgtacccgttgcagctgttcatgccggattttagccgtgtcatcgcagagccgttcaacgccaaccaccgatcgatcggggagaattttacctacccgcttccgttttttaaccgccccctcaaccgcctcctgttcgaggcggtcgtgggacccgccgccgtggcactgcgatgccgaaacgtggacgccgtggcccgcgccgccgcccacctggcgtttgacgaaaaccacgagggcgccgccctccccgccgacattacgttcacggccttcgaagccagccagggtaagaccccgcggggcgggcgcgacggcggcggcaagggcccggcgggcgggttcgaacagcgcctggcctccgtcatggccggagacgccgccctggccctcgagtctatcgtgtcgatggccgtctttgacgagccgcccaccgacatctccgcgtggccgctgttcgagggccaggacacggccgcggcccgcgccaacgccgtcggggcgtacctggcgcgcgccgcgggactcgtgggggccatggtatttagcaccaactcggccctccatctcaccgaggtggacgacgccggcccggcggacccaaaggaccacagcaaaccctccttttaccgcttcttcctcgtgcccgggacccacgtggcggccaacccacaggtggaccgcgagggacacgtggtgcccgggttcgagggtcggcccaccgcgcccctcgtcggcggaacccaggaatttgccggcgagcacctggccatgctgtgtgggttttccccggcgctgctggccaagatgctgttttacctggagcgctgcgacggcggcgtgatcgtcgggcgccaggagatggacgtgtttcgatacgtcgcggactccaaccagaccgacgtgccctgtaacctatgcaccttcgacacgcgccacgcctgcgtacacacgacgctcatgcgcctccgggcgcgccatccaaagttcgccagcgccgcccgcggagccatcggcgtcttcgggaccatgaacagcatgtatagcgactgcgacgtgctgggaaactacgccgccttctcggccctgaagcgcgcggacggatccgagaccgcccggaccatcatgcaggagacgtaccgcgcggcgaccgagcgcgtcatggccgaactcgagaccctgcagtacgtggaccaggcggtccccacggccatggggcggctggagaccatcatcaccaaccgcgaggccctgcatacggtggtgaacaacgtcaggcaggtcgtggaccgcgaggtggagcagctgatgcgcaacctggtggaggggaggaacttcaagtttcgcgacggtctgggcgaggccaaccacgccatgtccctgacgctggacccgtacgcgtgcgggccgtgccccctgcttcagcttctcgggcggcgatccaacctcgccgtgtaccaggacctggccctgagtcagtgccacggggtgttcgccgggcagtcggtcgaggggcgcaactttcgcaatcaattccaaccggtgctgcggcggcgcgtgatggacatgtttaacaacgggtttctgtcggccaaaacgctgacggtcgcgctctcggagggggcggctatctgcgcccccagcctaacggcgggccagacggcccccgccgagagcagcttcgagggcgacgttgcccgcgtgaccctggggtttcccaaggagctgcgcgtcaagagccgcgtgttgttcgcgggcgcgagcgccaacgcgtccgaggccgccaaggcgcgggtcgccagcctccagagcgcctaccagaagcccgacaagcgcgtggacatcctcctcggaccgctgggctttctgctcaagcagttccacgcggccatcttccccaacggcaagcccccggggtccaaccagccgaacccgcagtggttctggacggccctccaacgcaaccagcttcccgcccggctcctgtcgcgcgaggacatcgagaccatcgcgttcattaaaaagttttccctggactacggcgcgataaactttattaacctggcccccaacaacgtgagcgagctggcgatgtactacatggcaaaccagattctgcggtactgcgatcactcgacatacttcatcaacacccttacggccatcatcgcggggtcccgccgtccccccagcgtgcaggctgccgccgcgtggtccgcgcagggcggggcgggcctggaggccggggcccgcgcgctgatggacgccgtggacgcgcatccgggcgcgtggacgtccatgttcgccagctgcaacctgctgcggcccgtcatggcggcgcgccccatggtcgtgttggggttgagcatcagcaagtactacggcatggccggcaacgaccgtgtgtttcaggccgggaactgggccagcctgatgggcggcaaaaacgcgtgcccgctccttatttttgaccgcacccgcaagttcgtcctggcctgtccccgggccgggtttgtgtgcgcggcctcaagcctcggcggcggagcgcacgaaagctcgctgtgcgagcagctccggggcattatctccgagggcggggcggccgtcgccagtagcgtgttcgtggcgaccgtgaaaagcctggggccccgcacccagcagctgcagatcgaggactggctggcgctcctggaggacgagtacctaagcgaggagatgatggagctgaccgcgcgtgccctggagcgcggcaacggcgagtggtcgacggacgcggccctggaggtggcgcacgaggccgaggccctagtcagccaactcggcaacgccggggaggtgtttaactttggggattttggctgcgaggacgacaacgcgacgccgttcggcggcccgggggccccgggaccggcatttgccggccgcaaacgggcgttccacggggatgacccgtttggggaggggccccccgacaaaaagggagacctgacgttggatatgctgtagtaacggcaataaaaagacagaataaaacgcacggtgttgggtcgtttgttcaggcctattaat

SEQ ID NO: 134 - protein, 194 aa, synthetic construct; identical to SEQ ID NO: 8
